United States Patent Application Publication US 2004/0009474 A1 - sequence listing, part 2

SEQ ID NO: 7557 - DNA, 356 bp, Homo sapiens
gacaaagggataagaattagaggaagagtagaagatgaaaggaaagaataggatttgaggagagagaagtgtaaaaaaaaaatttagaattgatgaaacagaagagaatggaaagaaatgtaaaaagggttataattagggtaagggaatatgggataaaaaaaagtggaagaagggggaaaagaaaaggggagttttatcttaggaaagggaagtatagaaaaaattatgtggggataaattttggaaatctggaagtattaaaataaaagaaaataaatatctaattaaagtggttttggaaagggctatttggatataaaaatgcaatgggttaatataggaggaaaaataca

SEQ ID NO: 7558 - protein, 58 aa, Homo sapiens
MKQKRMERNVKRVIIRVREYGIKKSGRRGKRKGEFYLRKGKYRKNYVGINFGNLEVLK

SEQ ID NO: 7559 - DNA, 181 bp, Homo sapiens
  misc_feature (1)..(1): Wherein n may be a, c, g or t
  misc_feature (2)..(2): Wherein n may be a, c, g or t
nntgacacaagaaaacccccctttgaatgcagccagtctgaggtcacctttctgggcttggatcgaaacaaagggaacaggggaagtgaagctgcttgcaacatgcccagttcttcttgtgaggaatgctggtgcccagagcttgcggaagcatcccaggacttaaggcctactgtgatca

SEQ ID NO: 7560 - protein, 60 aa, Homo sapiens
  misc_feature (1)..(1): Wherein Xaa may be any naturally occuring amino acid
XDTRKPPFECSQSEVTFLGLDRNKGNRGSEAACNMPSSSCEECWCPELAEASQDLRPTVI

SEQ ID NO: 7561 - DNA, 416 bp, Homo sapiens
tgatcaccctgggtctgcttgagaaactgattgaaatggttttccatttcatttggaggttacaggggggagaagatggaaacatttattaatcagttcctaaccccattggtcaaaattccaccccaagtgtgttaaaaacccctctccccagactcaacagggaagccctggagtgggaggcaagaggcttgtttaaggaatggttctttgggttacacttatgtgaggttgattggagtctgtgccaaaccagtcgctacagtggtttttgggaataagtgaaaagtggggccaagagaatctgataccgggcacaaaaggtttcacaccttccttaaccttaccatctttggggacaataaatttaattaacataattaccagaatcttgctgcctccaagctccacctagg

SEQ ID NO: 7562 - protein, 60 aa, Homo sapiens
MLIKFIVPKDGKVKEGVKPFVPGIRFSWPHFSLIPKNHCSDWFGTDSNQPHISVTQRTIP

SEQ ID NO: 7563 - DNA, 320 bp, Homo sapiens
acgcgtcgtccgcaagcagcccgtcgtcaggcatgcaccgggccgggatggtgcctgccgccataaaggcacactcaaaagcgcgtggtcacctggttttggccatacagctggaaaatgcggccctccagcttggacacctcctttgaaacgtcctgggtgccgagcagatctgtcaacgtcggcggccttgcagtaaagggcaaaccttttgggctgcaaaagcatccctgggcatcctgcggcacgcacaactgcaggatcccagcaaccgctgcctcgtgggactgaacacaagcgcacatgaaagagacgaccat

SEQ ID NO: 7564 - protein, 81 aa, Homo sapiens
MVVSFMCACVQSHEAAVAGILQLCVPQDAQGCFCSPKGLPFTARPPTLTDLLGTQDVSKEVSKLEGRIFQLYGQNQVTTRF

SEQ ID NO: 7565 - DNA, 225 bp, Homo sapiens
actagtttgtgcgtggatggagtaattttcttaaaacatcatgatggccgaaataatggtgatgccatagtaaaatttgcttcatgtgttgatgcttcaggaggtcttaaatgtcatagaagttttatgggttcaagatttatagaagtaatgcaaggatcagaacaacaggggattgagtttggtggtaatgcagttaaggagggtgacgttcttaggagatct

SEQ ID NO: 7566 - protein, 75 aa, Homo sapiens
TSLCVDGVIFLKHHDGRNNGDAIVKFASCVDASGGLKCHRSFMGSRFIEVMQGSEQQGIEFGGNAVKEGDVLRRS

SEQ ID NO: 7567 - DNA, 312 bp, Homo sapiens
gccggcccagcacatggtcccaatgaccagcgccactggcagcacgaacctctcacggggcgggggcctgggcagagagcatttcctggggacagagcccacccacaaagtgctggtggagacagaccacccagcactcccaccagatcagaagcagaccttgatgtagtcaactgtggtgcgttgaggatgggcctccaaaaagacaagtccatgtcctactccaaaagctgtgagcgtgaccctcctttggaaaagggttcctgcacgtgtgattaaggccaggtcttcaggtgaatgtcctggactgcc

SEQ ID NO: 7568 - protein, 71 aa, Homo sapiens
MDLSFWRPILNAPQLTTSRSASDLVGVLGGLSPPALCGWALSPGNALCPGPRPVRGSCCQWRWSLGPCAGP

SEQ ID NO: 7569 - DNA, 279 bp, Homo sapiens
aaatttcaccaaagcagtgttaggtatttcacactgcgaaaaggcctgtggtggtacaaatggagaaagaccaatgatcctccggttagagaaacttcttctgatgaaaaaaacactcaaccactgatatgccattcacccctgcataataactaactaaatctggttgtttcacactagatatgagcaattttacattctgactatgtagatgtttcattattgcttttgccatttgcttagaggacttcatgcaatcacagacagcagaaacggatc

SEQ ID NO: 7570 - protein, 55 aa, Homo sapiens
MKSSKQMAKAIMKHLHSQNVKLLISSVKQPDLVSYYAGVNGISVVECFFHQKKFL

SEQ ID NO: 7571 - DNA, 313 bp, Homo sapiens
aaatttcaagccacaaagttggtgggaaatatgaaagaaactaatgaaaggtaatgtttgttttagtaaagtctgtttatgtaattttcttttcccagcgacaacttctcatctctggtgacaggagtcactctttacccctggtgcaagaaactttccttaaaggaggatttaaaacagttgaattatttcagaaatctttgcttttaggcagatagggggagtacagaaaaagccccttcccgtatctgttgatcctcaaatggctttagctcaaaacaatttttacatcacgatggcataatgtagatct

SEQ ID NO: 7572 - protein, 54 aa, Homo sapiens [sequence omitted]

SEQ ID NO: 7573 - DNA, 483 bp, Homo sapiens
aagcttgctggggacgtcgttggtccctccgctaccaaaacctctgagtcgctggttgatggcgagatcgccttggtcgaaaacgtttgcttcgagaagggcgagaccagtaaggacgaggcggagcgcgctgagctcgctcagaaatacgcctcgtttggtgagttttacgtctccaacggtttcggtgttgtgcaccgcaagcaggcttccgtctacgacgttgccaagctgctgccgagcgctgctggctccctcgttgccaaggaggtagaggtcctcgaaggcctgaccgccgatccgaagcggccgttcgtcgtcgtcctcggtggtgccaaggtcgccgacaagcttgccgtcatcgataacctgctcaaggccgctgacactctcgttattggtggcggtatggcgtacaccttcctcaaggccaagggtctcgaggtcggtgactccctacttgacgaagattcgatcgacgcg

SEQ ID NO: 7574 - protein, 161 aa, Homo sapiens
KLAGDVVGPSATKTSESLVDGEIALVENVCFEKGETSKDEAERAELAQKYASFGEFYVSNGFGVVHRKQASVYDVAKLLPSAAGSLVAKEVEVLEGLTADPKRPFVVVLGGAKVADKLAVIDNLLKAADTLVIGGGMAYTFLKAKGLEVGDSLLDEDSIDA

SEQ ID NO: 7575 - DNA, 230 bp, Homo sapiens
  misc_feature (1)..(1): Wherein n may be a, c, g or t
  misc_feature (2)..(2): Wherein n may be a, c, g or t
nntcgcgatgactcagatgacgtgttggggtcatatgattcctcgtcgggggtcgtcgtcaccaatgccatccagaccagcgccgcgattaacccaggcaattccgggggtgcgctggtcaatgccaatggtgaactcgtcggcatcaactcctcaatcgccagtttgccgtcggcggaccgctcccagtcgggcaatatcggcatcgggttcgccatcccatcgaattc

SEQ ID NO: 7576 - protein, 76 aa, Homo sapiens
  misc_feature (1)..(1): Wherein Xaa may be any naturally occuring amino acid
XRDDSDDVLGSYDSSSGVVVTNAIQTSAAINPGNSGGALVNANGELVGINSSIASLPSADRSQSGNIGIGFAIPSN

SEQ ID NO: 7577 - DNA, 432 bp, Homo sapiens
  misc_feature (43)..(43): Wherein n may be a, c, g or t
  misc_feature (106)..(106): Wherein n may be a, c, g or t
  misc_feature (184)..(184): Wherein n may be a, c, g or t
aaggaaaaccactacataatcatgtcaacagatagagacaaancatttgacaaaatccaaaacccctttataatgaaaacactcaacaagctagaaataaaagggnaattcctcaatctagtaaagggcatctatgaaaaactcatagctaatatcatacctaatggtgaaaaactaaaagctnttcctctaaaaacaggaatgaagatgggatgtcagctttcaccacttctattcaacattttactagccagggcaattagggaaggacaaaaaagtgtccagatttaaaaggaagaactacaactctattcccaaatgacataatcctatatatagaaaatcccaaggaatccacaccaaaaaaaattcagcaaagttgcaggatacaagatccaatatataaaaatcaattttatgtctatacaattg

SEQ ID NO: 7578 - protein, 96 aa, Homo sapiens
  misc_feature (15)..(15): Wherein Xaa may be any naturally occuring amino acid
  misc_feature (36)..(36): Wherein Xaa may be any naturally occuring amino acid
  misc_feature (62)..(62): Wherein Xaa may be any naturally occuring amino acid
KENHYIIMSTDRDKXFDKIQNPFIMKTLNKLEIKGXFLNLVKGIYEKLIANIIPNGEKLKAXPLKTGMKMGCQLSPLLFNILLARAIREGQKSVQI

SEQ ID NO: 7579 - DNA, 212 bp, Homo sapiens
  misc_feature (1)..(1): Wherein n may be a, c, g or t
ngcaatacggatcagggacagaaaagaacaaaacaaacacaaaaatggaatggaaggagcagaggaactcttctaggaagaatgcaaggatggttttgtcacaggatcactcattgctacagaaacacagtttcatggcttttgatacccggctgacctccactgaccaggagcaactttgtcctggggtccctggctgggaagagagcctt

SEQ ID NO: 7580 - protein, 56 aa, Homo sapiens [sequence omitted]

SEQ ID NO: 7581 - DNA, 546 bp, Homo sapiens
atcacactttctacaatcgtaaattcagacgttattccaagttcgaaaagaggaatttttcaagcgtttcagaatttacttttgggatttggtgccatatgtggagcgtctttcggtggcacaatagcgccgaccattggttggaggtggtgttttctcatccaagtacccatatctgtgattagttccatattaatgaattattatgtacctaatcagaaagaatataatcgtcaaaattctagcatattccaaaatcccggaaaaatactcagggacatagatgttatgggctcaattcttattataactggtctcacactacagcttctttacctgagcctggggtgttctacttctaaattatcatggaccagcccttctgtgctactgctattagttgggagtgtaataatcctcttactgttcatattgcacgaaaggaaaacaagtgctagagcgattattcctatggagctggtcaattcctcctacagtgtcgttgtactttcgataagtatacttgttggttttgccagctacgcg

SEQ ID NO: 7582 - protein, 182 aa, Homo sapiens
ITLSTIVNSDVIPSSKRGIFQAFQNLLLGFGAICGASFGGTIAPTIGWRWCFLIQVPISVISSILMNYYVPNQKEYNRQNSSIFQNPGKILRDIDVMGSILIITGLTLQLLYLSLGCSTSKLSWTSPSVLLLLVGSVIILLLFILHERKTSARAIIPMELVNSSYSVVVLSISILVGFASYA

SEQ ID NO: 7583 - DNA, 189 bp, Homo sapiens
gtgcactgctgcctctacttcatctcccccttcggacatggattgaggccagtggacgtaggcttcatgaaggcgctgcacgagaaggtgaacatcgttccactcatcgccaaagccgactgcctggttcccagtgagatccggaagctgaaggacaggatacgagaggagatcgacaagtttgggatc

SEQ ID NO: 7584 - protein, 63 aa, Homo sapiens
VHCCLYFISPFGHGLRPVDVGFMKALHEKVNIVPLIAKADCLVPSEIRKLKDRIREEIDKFGI

SEQ ID NO: 7585 - DNA, 282 bp, Homo sapiens
gtaccaatttcaaaatggttaaatagtattacttctggaggattgaaaagctgtgacttggattttcctttacgagaaaacactaatgtcctcgatgttaaagataaaggaagaaaagatcatattttcttcaaatacatttacgaactaattttggccggtgcgattgatgaagcattagaagaagctaaactttccgacaatatttcaatttgtatgatcctgtgtgggatacaagagtacttaaaccctgtcattgatacgcaaattgcaaacgaattc

SEQ ID NO: 7586 - protein, 94 aa, Homo sapiens
VPISKWLNSITSGGLKSCDLDFPLRENTNVLDVKDKGRKDHIFFKYIYELILAGAIDEALEEAKLSDNISICMILCGIQEYLNPVIDTQIANEF

SEQ ID NO: 7587 - DNA, 321 bp, Homo sapiens
  misc_feature (1)..(1): Wherein n may be a, c, g or t
ntagtccagtgaagctttgttttcataaaggtcatcagtggcctccatgcggccatgtccacggtcacttggcttccagaatgcccctctctggtgtcctccttccacccttggtttcttttgctggttcctcttctccccagcctcacgtcccaggacttgctcatgtgtcctctctttctgttccctctcgtcctttgggcttctcatctaatttcacagcttcatagaatggtggcaactctcaaatttacaactccagtccaaacttgaggatctgcccctcctccccttcctgcacccagaggctggagtgtgctt

SEQ ID NO: 7588 - protein, 72 aa, Homo sapiens
MSTVTWLPECPSLVSSFHPWFLLLVPLLPSLTSQDLLMCPLFLFPLVLWASHLISQLHRMVATLKFTTPVQT

SEQ ID NO: 7589 - DNA, 198 bp, Homo sapiens
ccatggcgacttcccttccagtttccgatggccctggcttgtaacccctcttccctccgggccacaaggccactgctttgctgcctgaccctctctgggctctcatttccgcctcccacaaggtccctgaacaaggcaccacccagccgagtcctgttgggtcttgaagggggagtccagggtctagaatctgctagc

SEQ ID NO: 7590 - protein, 57 aa, Homo sapiens [sequence omitted]

SEQ ID NO: 7591 - DNA, 427 bp, Homo sapiens
  misc_feature (1)..(1): Wherein n may be a, c, g or t
  misc_feature (2)..(2): Wherein n may be a, c, g or t
nnttcggtgaacccgaagcccggacgcagcgccgatacccatgtgcgcccagtactacgccatcacgccaagcgagtgctcatcatcggggccgggctagccggcatggaggctgcgcgagttctcagcgaacgcgcacacgaacctctcatcgtcgaggccagcgaccacattggcggagtcatccttgcgggtggtcaaccttccttcaaggaggacgacctagctctgctggagtggtaccgcaccaccctggaggagttgggcgtggagattcgactcaacaccaccgtaacggctgatcttatcgcttccttcggggccgatcacgtcgtcctggcgaccggatcgaggccgcgtcgactcgacctaggtgatgatgccaaggtcattgacgccaccgacgctctgctcaaccgcgacgcgt

SEQ ID NO: 7592 - protein, 142 aa, Homo sapiens
  misc_feature (1)..(1): Wherein Xaa may be any naturally occuring amino acid
XSVNPKPGRSADTHVRPVLRHHAKRVLIIGAGLAGMEAARVLSERAHEPLIVEASDHIGGVILAGGQPSFKEDDLALLEWYRTTLEELGVEIRLNTTVTADLIASFGADHVVLATGSRPRRLDLGDDAKVIDATDALLNRDA

SEQ ID NO: 7593 - DNA, 327 bp, Homo sapiens
tgatcagatcgtggcgagtctgtcactggacaactggcgctttctgctcaccccgcgcctggaagcaaccgtatggaaagctctcactgacttacgtaacggaggtatgcctcactacccggggcgtagccgacgcgacttcgaggaaaacgtggagctcatccgccacgtccgtaaccgcgcctcccatcaagagcccctcatcagcgctcaccctgaccaacaagctgagattcgcaggcttgcccactacgtaacagcgatcgacaccgtcgcccgcaacatcaaccccgacgcggccgaatggatcgccacccactcacgcgt

SEQ ID NO: 7594 - protein, 73 aa, Homo sapiens
MPHYPGRSRRDFEENVELIRHVRNRASHQEPLISAHPDQQAEIRRLAHYVTAIDTVARNINPDAAEWIATHSR

SEQ ID NO: 7595 - DNA, 431 bp, Homo sapiens
cccgggaggtcaccacacccggagcgcatcccgttcgtccatacgcagcggttgcagctttgagggcgtgtcctccgaggtccaatcgttgcgaccacgtacttatgcataaggccgtggcgcagcaagctaacccgctagccatgccaactcatattcacgaaatgggccactacgtctaggctggaataacccgtcaccaggaggatcgtgaccgagcagtccacgcacccaaagccccgccatgccgagccagaggacgtctccccgagcgcaccgccacgtgccagcgccgcgacgatgttcccccctccccccccccgaagtcccccgagccccaagccgcgtcgtcggcaaaggtgggacggatcgccgccgggctctacctcgccgcagcagtcgctgccgccgctgcgcttttaatcgcgcgc

SEQ ID NO: 7596 - protein, 76 aa, Homo sapiens
PVTRRIVTEQSTHPKPRHAEPEDVSPSAPPRASAATMFPPPPPRSPPSPKPRRRQRWDGSPPGSTSPQQSLPPLRF

SEQ ID NO: 7597 - DNA, 357 bp, Homo sapiens
  misc_feature (1)..(1): Wherein n may be a, c, g or t
  misc_feature (2)..(2): Wherein n may be a, c, g or t
nnagatctgaaacttcagcaggaggagcaggccccaaaccgaggtgaaaggctgcccagcctcatcctcttggtgactgagtttgccttttctcaggttcctcgggcatttgtgaacctggtgacggtgcttgagatcgtcaacctgagggagctgtaccaggagaaaaaagtctactgcccaaggatgatcctcaggtcagacagatacttctccccgattctactaagaatcctcactgctaagggcagtggcacccttagcaaattccttagaaaacccaagggccgaagtgtgaaagggctgtgaccaccccatcttctaacctggaaaagcctaaggggaggatatcctagg

SEQ ID NO: 7598 - protein, 102 aa, Homo sapiens
  misc_feature (1)..(1): Wherein Xaa may be any naturally occuring amino acid
XDLKLQQEEQAPNRGERLPSLILLVTEFAFSQVPRAFVNLVTVLEIVNLRELYQEKKVYCPRMILRSDRYFSPILLRILTAKGSGTLSKFLRKPKGRSVKGL

SEQ ID NO: 7599 - DNA, 498 bp, Homo sapiens
acgcgtaaacagtggtggttggatcaaggcctagctgaagagaatattgaatttgaatacgtgacaggtgatgacctagcacattactccaaatctactgtggatattttatataagtttccacatggttttgaagagttagaaggtgttgctaaccgtactgattatgacctaggttctcatacgaaagcgcaagaagagtttgatctgtatgcgaaagtgaaaaagaacgagcattcgacaacgaaactggcgattcgagatctagaagccggtaaatgggaagtgcctttctgtattgaaccatctgctggtctagagcgtggtttattagccgtgatgacagaagcgtatacagaagaagagcttccaaatggtacaactcgtaccgttcttaaatttaagcctcatctagcgccgatcaaagtcgctatcatgcctcttaaaaagaataagccagaaatcgtagcgcttgcgaaagaattgaaaaacaagctt

SEQ ID NO: 7600 - protein, 166 aa, Homo sapiens
TRKQWWLDQGLAEENIEFEYVTGDDLAHYSKSTVDILYKFPHGFEELEGVANRTDYDLGSHTKAQEEFDLYAKVKKNEHSTTKLAIRDLEAGKWEVPFCIEPSAGLERGLLAVMTEAYTEEELPNGTTRTVLKFKPHLAPIKVAIMPLKKNKPEIVALAKELKNKL

SEQ ID NO: 7601 - DNA, 382 bp, Homo sapiens
  misc_feature (12)..(12): Wherein n may be a, c, g or t
  misc_feature (14)..(14): Wherein n may be a, c, g or t
  misc_feature (211)..(211): Wherein n may be a, c, g or t
  misc_feature (212)..(212): Wherein n may be a, c, g or t
  misc_feature (258)..(258): Wherein n may be a, c, g or t
  misc_feature (346)..(346): Wherein n may be a, c, g or t
  misc_feature (347)..(347): Wherein n may be a, c, g or t
  misc_feature (357)..(357): Wherein n may be a, c, g or t
  misc_feature (382)..(382): Wherein n may be a, c, g or t
agatctgaaatnanatatctcttacagttgaatgtgtgtgtatatgtatgtgtgtgcacacacgcatatgcatgcacatgtccatatatttagtattgatgtagtgtccatgcagctgatattcaaccacactcgtatagcatactttgcagatactatagtatatttcctgactggtcagtgccctcattggccccatatcgggtattannagtttatatatcagaagtattttaagtatgccccactttctagatnacaaatgatctattggttaggttggaagctgtcttacaatctatagctttcataccagagttcaatcaatgaattcagagaatcaganncatgttagtntagaagttcatcttcatggaggtan

SEQ ID NO: 7602 - protein, 90 aa, Homo sapiens
  misc_feature (60)..(60): Wherein Xaa may be any naturally occuring amino acid
  misc_feature (61)..(61): Wherein Xaa may be any naturally occuring amino acid
  misc_feature (76)..(76): Wherein Xaa may be any naturally occuring amino acid
MCVYMYVCAHTHMHAHVHIFSIDVVSMQLIFNHTRIAYFADTIVYFLTGQCPHWPHIGYXXFIYQKYFKYAPLSRXQMIYWLGWKLSYNL

SEQ ID NO: 7603 - DNA, 274 bp, Homo sapiens
  misc_feature (1)..(1): Wherein n may be a, c, g or t
  misc_feature (2)..(2): Wherein n may be a, c, g or t
nncgggtggcagaaacggatgctgcaagagcgcggcacccgctttatcttcccgagcgatgagttctacctgctcgcggacgaaccgctgccgagctgcgaggcttacgagggttttccgatgttggaaaacggcgtcgggatgattcaggactttttgggggacgccctgccgctcctgccgacccggctcgacagaccgcgcaaagtcattttggcgacgggcaagctgtttgcgccggttttggacctcgccgtcgcgccccctcggggaa

SEQ ID NO: 7604 - protein, 91 aa, Homo sapiens
  misc_feature (1)..(1): Wherein Xaa may be any naturally occuring amino acid
XGWQKRMLQERGTRFIFPSDEFYLLADEPLPSCEAYEGFPMLENGVGMIQDFLGDALPLLPTRLDRPRKVILATGKLFAPVLDLAVAPPRG

SEQ ID NO: 7605 - DNA, 261 bp, Homo sapiens
gaccgttttggtctgctgaccgacaaactgcctaacctgctcgatttccagagcaagctggtgcaaaagaacgaaaacctgagcgcatggcagacgtccagcgatgccatctcgttgctggacgtggtacgtaacgccaagccaaccattttgatcggcgtttccggccagccgggcttgttcaccgaagaactgatccgcgaaatgcacaagcattgtccacgcccaatcgtgatgccgctgtccaacccgacctcacgc

SEQ ID NO: 7606 - protein, 87 aa, Homo sapiens
DRFGLLTDKLPNLLDFQSKLVQKNENLSAWQTSSDAISLLDVVRNAKPTILIGVSGQPGLFTEELIREMHKHCPRPIVMPLSNPTSR

SEQ ID NO: 7607 - DNA, 228 bp, Homo sapiens
ccagcccctgctcttcctcctgcatctcctgaagtaagaaaagaagaaacgcatccaaagcatagtttcccgcctttaccaaatcagtttgcgccattaccagaccctccacaacataactctccacctcaaaataacgcgccttcgcaaccccaaagcaatccatttccattcccaattcctgaaattccctcgacacagtctgcaacaaacccatttccatttccg

SEQ ID NO: 7608 - protein, 76 aa, Homo sapiens
PAPALPPASPEVRKEETHPKHSFPPLPNQFAPLPDPPQHNSPPQNNAPSQPQSNPFPFPIPEIPSTQSATNPFPFP

SEQ ID NO: 7609 - DNA, 552 bp, Homo sapiens
  misc_feature (1)..(1): Wherein n may be a, c, g or t
  misc_feature (2)..(2): Wherein n may be a, c, g or t
nnacgcgttgtggtaggaactttgacgatgatactgcgttggctcttgaacgcatagtacatttgtcgttcacaacggaaagtgaaatactgaaaaaaaaagaaaaattttcttagggactcatcatcaatgtaaacacctctacagccgtcaagactagcaaagctcacctcacaaaacgacatgccgcgcataaagaccagaagatccaagcctgcacctgacgggttcgaaaaaatcaagccaaccctcacagatttcgaaatccaactcagagatgcccaaaaggacaagtcgtctaagctcgcagcaaagtccaatgagcagctctgggagataatgcaactccaccaccagcgctctagatacatatatactctgtactacaagagaaaggccatctccaaagacctttacgattggttgataaaggaaaagtatgctgataaattgctaattgccaaatggcgcaaaaccgggtatgaaaaactgtgctgtctgcgctgcattcaaaagaacgaaactaacaacggtagcacttgcatctgcagg

SEQ ID NO: 7610 - protein, 123 aa, Homo sapiens
MPRIKTRRSKPAPDGFEKIKPTLTDFEIQLRDAQKDKSSKLAAKSNEQLWEIMQLHHQRSRYIYTLYYKRKAISKDLYDWLIKEKYADKLLIAKWRKTGYEKLCCLRCIQKNETNNGSTCICR

SEQ ID NO: 7611 - DNA, 294 bp, Homo sapiens
tgatcagccataaaaaacacacaaaatcttatccaaatgccttatggctgtggggagcagaacatggtcctttttgctccgaacatctatgttctgaaatatctgaatgaaactcaacagctgacagagaagatcaagtccaaggcccttggttacctcagagctggttatcagagagaactgaactacaaacacaaagatggctcctacagtgcttttggggatcacaatggccagggtcaaggaaacacttggctcacagcctttgtgctcaagtcttttgcccaagctcga

SEQ ID NO: 7612 - protein, 97 aa, Homo sapiens
SAIKNTQNLIQMPYGCGEQNMVLFAPNIYVLKYLNETQQLTEKIKSKALGYLRAGYQRELNYKHKDGSYSAFGDHNGQGQGNTWLTAFVLKSFAQAR

SEQ ID NO: 7613 - DNA, 243 bp, Homo sapiens
acatgtccacagatgatgtcatcaccaagtagtgagtacagtatcaaagctgcacacctagcctccctgggtcaggggtgggatgactggacagaggtcacctgcccagtttccctgtgtcagcagagtgcacagaagggaatccataccataggtcagtgtagatggagccagaagtggcatttttttgggttttattttcttttgttttaagggtgaaagccacatgaagttttcattttt

SEQ ID NO: 7614 - protein, 66 aa, Homo sapiens
MMSSPSSEYSIKAAHLASLGQGWDDWTEVTCPVSLCQQSAQKGIHTIGQCRWSQKWHFFGFYFLLF

SEQ ID NO: 7615 - DNA, 171 bp, Homo sapiens
gcgttttgcaaagtctttcgagccttttatctaagggggaaaaatcatacaaatgaagcgccagaatttgaagaacaaggtaatggaaaccacgaatatgcaaggttctcagttttaagactaaaatctgcatgggaaagccgtagcttttgtaatgttaataatagatct

SEQ ID NO: 7616 - protein, 57 aa, Homo sapiens
AFCKVFRAFYLRGKNHTNEAPEFEEQGNGNHEYARFSVLRLKSAWESRSFCNVNNRS

SEQ ID NO: 7617 - DNA, 156 bp, Homo sapiens
atcttggccacttatgatgctttggatgttcttggaaaagatcgtaaggtttgcttgatttccttcatccgtgggaatcaattggaagatggttcgttccagggtgacaggtttggggaggtagatacaaggtttgtttatacagccttgagtgca

SEQ ID NO: 7618 - protein, 52 aa, Homo sapiens
ILATYDALDVLGKDRKVCLISFIRGNQLEDGSFQGDRFGEVDTRFVYTALSA

SEQ ID NO: 7619 - DNA, 356 bp, Homo sapiens
agatcttccaaatgctgacatatttcattttaaaataccaaaacgtaatgctaacatcatcactgatcttatcaggaatgccttgggaatctgttaagcacacagtgacggtcataagtttacaaaaattatttcatttgcaactcaaattttgtcattggcaataaatactgtccggtgttttccatgaagtgatagattcatgtcattaatgtttgaggtaatatctgacaaatagtcaggtctgtatgactctatatgttttcccatcatactttcaactaaaatggtgttttatgaaaaatttagctactttaccttgcaatgttaagtactttttcatgaggcaaccatgg

SEQ ID NO: 7620 - protein, 51 aa, Homo sapiens
MLTYFILKYQNVMLTSSLILSGMPWESVKHTVTVISLQKLFHLQLKFCHWQ

SEQ ID NO: 7621 - DNA, 396 bp, Homo sapiens
agatctgggaagagctcttggtctctcttgttctgcccatagactgaccatccagggttcctgtggtcaggagacggcaagagtccgcttttcttcctcgcctctccaggcatggagaatgggcttaaccaaggccacgtgtccagagaggtgtacccaggggtgacgtggtctgagaggccttccacctaccctcagggagcctgggtttctcaggggttcagtggggcagcactttttgcttgttgttgttttaagtttgtagcattaaattgatttaaaagatgaagttggctatgccaggtaggtccgagctagctgactgggaatttgaagtttggatgttgagctaatatgtactggtgcccatttgggttaatttgtcttatcctcgag

SEQ ID NO: 7622 - protein, 54 aa, Homo sapiens
MENGLNQGHVSREVYPGVTWSERPSTYPQGAWVSQGFSGAALFACCCFKFVALN

SEQ ID NO: 7623 - DNA, 359 bp, Homo sapiens
gtgcactgaattttgaacgtcctggagtggcctacgaagccgctatcaccggtaaagaaccaaaaacccatgaacaagcctgcaatgagctcattgatatggtctccccacaaaagtagctctcccacggaagcagagagtgtggtttactgtgctcactaaaattttttagagatgtatttcagttgaaaggtcagtacgtgatgaagcctgtatctacagggaaaagactagtaacggccgtagttatgtgtggcctgctagtgggcgtatcggggtgtgagagtcattctgtgttgtctgggaagtctgtggggaaatcgtctacatctgcgtcggcgagtgcggggcgtgatccc

SEQ ID NO: 7624 - protein, 52 aa, Homo sapiens
MKPVSTGKRLVTAVVMCGLLVGVSGCESHSVLSGKSVGKSSTSASASAGRDP

SEQ ID NO: 7625 - DNA, 371 bp, Homo sapiens
acgcgtggactcatgacgctaggcgagtgcttgggacactccaccgctccgctggtgaagggcatgaccactaccctcgtcatgatggtcctgggctggatgtggtcatggcagttggggttggccctgctccttgccattccgaccatgtacctcctcacgatcgcctcacgcgccctcaaacttcgcggtgaagcgttgacgtaccccacggagcaggaattggcggcccgaatagtcgagttctgtgaatctcaacctgcactgcgggcagctggacgtgccaccggctatcaacctctccatgatgcccaggtggccagcagacgtgctgcccgcaaggatctgtggctaggagtgttggcgagctc

SEQ ID NO: 7626 - protein, 123 aa, Homo sapiens
TRGLMTLGECLGHSTAPLVKGMTTTLVMMVLGWMWSWQLGLALLLAIPTMYLLTIASRALKLRGEALTYPTEQELAARIVEFCESQPALRAAGRATGYQPLHDAQVASRRAARKDLWLGVLAS

SEQ ID NO: 7627 - DNA, 555 bp, Homo sapiens
acgcgtcctccagggcctcagctgctgtatgcctgtgtcagtcccagtggcgatgagctgcagatggggcacaggggtggtttgcccagggcagaagtggctcgttctgaaaaaggaagcaggtgctggccacggagagcccctcttggggaccaggggctggggctggcctgcagagcccagattcctctcacagactgggtggcggggggtctgtctggcctctgtgcccttgatcccacggggtcctctactggggaatcccccttcccctttagtccaaaccctgctggtctttttgggccacctcaggttttctacctgttgtccaaagctccccgtgacctggccccgccagaagcagcagccatgggtccttttcctgagcagcttcgtgctctttttagcttgtgggtagcagttccagggcctgctcctggggacctgtaagaacaggaactgtgtctgagtcattgcagggtcccgaagggaagacgaacactcctcatcctctgatcctggatccgcaccctcgttttggagaatgcagggccc

SEQ ID NO: 7628 - protein, 158 aa, Homo sapiens [sequence omitted]

SEQ ID NO: 7629 - DNA, 315 bp, Homo sapiens
ccaccaacggcgccacaacgtaaaatttctttgccagaggcattgcgaaaagtcgaattgatgaaaaaatctaaaaccgagcctgttttagagtcctcaaacgaactgagcataaacgcaaaattagacgcaataattgcctctagaaacttaagagcatctaatactctaccagaacttagcggtgttaacactaatattgcaacttctgacaagtatactacttctagagatgaaacagtgaaggaaactaaaccattagttcacccgaataaaaataggactcgtggtcccagaagaaaacttccaacacgc

SEQ ID NO: 7630 - protein, 105 aa, Homo sapiens
PPTAPQRKISLPEALRKVELMKKSKTEPVLESSNELSINAKLDAIIASRNLRASNTLPELSGVNTNIATSDKYTTSRDETVKETKPLVHPNKNRTRGPRRKLPTR

SEQ ID NO: 7631 - DNA, 275 bp, Homo sapiens
ctatgagttacacaatttaaggctttcaatagtgaactctgaaattgataacatacaacctattagtttgtggacttctgggaaaagctctaaagaaagaatttggaaattctggagaaagtctgaactgtgttaaagaagcaacagcttctgtaacctcagaactgcctcctctcccttttctaccttggctaagatcaggagctgccaacattgaatgtctgactttcccttgaaaatactgccaatggaaaatgttatttcaggcattaaag

SEQ ID NO: 7632 - protein, 62 aa, Homo sapiens
MLAAPDLSQGRKGRGGSSEVTEAVASLTQFRLSPEFPNSFFRAFPRSPQTNRLYVINFRVHY

SEQ ID NO: 7633 - DNA, 338 bp, Homo sapiens
  misc_feature (338)..(338): Wherein n may be a, c, g or t
tcgcgagcacactccagcctctgagttgaaacttgaggatgaagagagattagaacccataactcaggggctggaacagacagaaacacttgtaagagtagtgagactttagcctcagatagcaacgaagctttgccccagatgggcaccagatcttctgaaatgccgaaagccctccccagagcaaatctcatttattctcctaacgcttggccagttttagaggaagcacgaagggttgagcaatttactcaaggctacctggcttatcagtgaattctgggttaatgtcctggccccgggtgcctttccacactgcctctctggaaaatgcaagn

SEQ ID NO: 7634 - protein, 64 aa, Homo sapiens [sequence omitted]

SEQ ID NO: 7635 - DNA, 265 bp, Homo sapiens
ggatccatccaaagcagatggtctcagtctttcttcccctcctccagaaggatctagatgacttctaggaaacacacccttccccataatgccgcttcccatttcttgctggccaacaccacctcccccgtgagatgtcacctgggaatgccagttaggacccccattccaactgggcacaggcagaactggtaaagaatggtttctatcccttttaggtgctgactcaaggctgtgtaaactggccaggccaaacattactagt

SEQ ID NO: 7636 - protein, 86 aa, Homo sapiens
MFGLASLHSLESAPKRDRNHSLPVLPVPSWNGGPNWHSQVTSHGGGGVGQQEMGSGIMGKGVFPRSHLDPSGGGEERLRPSALDGS

SEQ ID NO: 7637 - DNA, 398 bp, Homo sapiens
ggctcacaccggctaccaacccttgatgatcgcaccaaaatgccatacactgatgcagtcattcacgaaattcagagattttcagatattgtccctactggagcaccacacagagtgaccaaagataccatgttccgagggtacctgctccccaagaacactgaggtgtaccccatcctgagttcagctctccatgacccacagtactttgaacaaccagacagtttcaatcctgaccacttcctggatgccaatggggcactgaagaaatgtgaagctttcatgcccttctccataggaaagcgtatgtgtcttggagaaggcattgcccgaagtgaattgttccttttcttcactaccatcctccagaactactcagtgtccagccctgtggatcc

SEQ ID NO: 7638 - protein, 132 aa, Homo sapiens
GSHRLPTLDDRTKMPYTDAVIHEIQRFSDIVPTGAPHRVTKDTMFRGYLLPKNTEVYPILSSALHDPQYFEQPDSFNPDHFLDANGALKKCEAFMPFSIGKRMCLGEGIARSELFLFFTTILQNYSVSSPVD

SEQ ID NO: 7639 - DNA, 302 bp, Homo sapiens
gccctctgctggcctccttggaaccttaatgcatgtggtgtacacgcttacactcaggcacacacacatacattaaaaaaaaaaacaatttagccatgtctaatggcaaacacctttaatctcagtacttgggaggcagagacacatggatctctgcatttgaaggcagccccagctacaatcttaaaatgcccaaactactggggtttggtggtgcaaatctgtgatcccagtgctgggggaaattgccagaagcttgcgacctgcttagacttcatagaattcccaatcagttttggcca

SEQ ID NO: 7640 - protein, 66 aa, Homo sapiens
MANTFNLSTWEAETHGSLHLKAAPATILKCPNYWGLVVQICDPSAGGNCQKLATCLDFIEFPISFG

SEQ ID NO: 7641 - DNA, 419 bp, Homo sapiens
  misc_feature (1)..(1): Wherein n may be a, c, g or t
ngccaagtcattctgtggttttaaagacagcgacctccgaacctgcgggttccccatctgctgctcagggctcccccaaccacagatctagacatggttgctaagggggtgctggatggaaggcaggtccctaggagaccctgttctgagaagcagagtcttaaaatgcatttagccgatgagggccacattggttgggtgaagtaatggccaaatggcatctgaataataataataaccagaattataacgccaggtaaagctgagctgataacatcatcaccatcattgttcttgcattaatggtctctctcaccaagaaattattggagtattattattcatcgaggggaaattcacattacaccaaattaaccattttaaagtgtatcatttagtatcatttaatctgggatgca

SEQ ID NO: 7642 - protein, 66 aa, Homo sapiens [sequence omitted]

SEQ ID NO: 7643 - DNA, 227 bp, Homo sapiens
tcgttgccggtcgccacaccaatacctaccttgcaacctgcttcttcgagcgtgggtagtgtctcttcaagtcgacgcaccagcgccaagcgatcagcttgatgcaatatccaaggctccgacccattgaccaccccagacatctcgaccacacccgccttatggttcaacttcgtgcccgtcattggcttcgcaagcggaccgaacacctccgcacagatggctgg

SEQ ID NO: 7644 - protein, 61 aa, Homo sapiens
MTGTKLNHKAGVVEMSGVVNGSEPWILHQADRLALVRRLEETLPTLEEAGCKVGIGVATGN

SEQ ID NO: 7645 - DNA, 177 bp, Homo sapiens
aaggactactacttccagatgtactatgatgatctccctctgtggggcttcatcggtaaagttgagaagggcggcaaggatgatccgagcgagtggaaatactatctgtacaggcacatcatcttcgacatcctatccaacaacgaccgggtgatcgaaatcaatgtgcacactgat

SEQ ID NO: 7646 - protein, 59 aa, Homo sapiens
KDYYFQMYYDDLPLWGFIGKVEKGGKDDPSEWKYYLYRHIIFDILSNNDRVIEINVHTD

SEQ ID NO: 7647 - DNA, 212 bp, Homo sapiens
  misc_feature (1)..(1): Wherein n may be a, c, g or t
nacgcgttgacacgcttagacgttgtagaaatcgaactgggtgacatcgaatcgattgagcagctccacgagcgactgatggacaagctgcggtttccaggttggtacggaaagaactgggacgcattctgggatgcgattacggcgctggtagacatgccacacgttctgcggctcaaacactgggctgagttcgaacgcaagttcccggg

SEQ ID NO: 7648 - protein, 70 aa, Homo sapiens
  misc_feature (1)..(1): Wherein Xaa may be any naturally occuring amino acid
XALTRLDVVEIELGDIESIEQLHERLMDKLRFPGWYGKNWDAFWDAITALVDMPHVLRLKHWAEFERKFP

SEQ ID NO: 7649 - DNA, 339 bp, Homo sapiens
acgcgttgcctttaacctctatgccaaagcacgtcagcctgctgggttatggcggtctgttgccgtttatttttctggcgctgctgatcccgttctctctcgactatcggccattgtttgaaattgcgcttgttaactatggcgcagtcatcctgagcttcgtcggagccttgcactggggcttcgccatgagcgtgcaagacataagcgccgagcagcgctccgaccggtttatctggagtgtcattcctgcgcttattgcttggattgccacgttattgccaatgccattgggttgcttgctgttggtcatcggctttgttgtccacctccggcagg

SEQ ID NO: 7650 - protein, 106 aa, Homo sapiens
MPKHVSLLGYGGLLPFIFLALLIPFSLDYRPLFEIALVNYGAVILSFVGALHWGFAMSVQDISAEQRSDRFIWSVIPALIAWIATLLPMPLGCLLLVIGFVVHLRQ

SEQ ID NO: 7651 - DNA, 201 bp, Homo sapiens
  misc_feature (151)..(151): Wherein n may be a, c, g or t
cggaaaatgacccgctctgctgtgctgaagcggcatggggttcaggagtgcattctcctggtaactcagcggattaccaaatacccagtgctcatcaacaggatcctgcagaattcccatgggattgaagaggagtaccaagacttggcangcaccctagggctagtaaaggagttgttgtccaatgtggaccaggatgta

SEQ ID NO: 7652 - protein, 67 aa, Homo sapiens
  misc_feature (51)..(51): Wherein Xaa may be any naturally occuring amino acid
RKMTRSAVLKRHGVQECILLVTQRITKYPVLINRILQNSHGIEEEYQDLAXTLGLVKELLSNVDQDV

SEQ ID NO: 7653 - DNA, 317 bp, Homo sapiens
ggatcctatcccaacctcgaggccagcacatgagcaaccttatctccctcaggccatggtacataacagccacaggttccagggataaggagggcttgggaggcggaggccgttattttttctaccgcagcaactatcttgattctgtattgactcactcatttattatctgtctccaccacgaggatgtaagactcacgagagccaagaccttgtccatcttgccctccactgtctctgtagcaccagaaggatgcctggcacagagtaggtgctcagtaaacatttgctgcatgattgaatgaaggagtaaattt

SEQ ID NO: 7654 - protein, 91 aa, Homo sapiens [sequence omitted]

SEQ ID NO: 7655 - DNA, 302 bp, Homo sapiens
gtgcacattcagacagtgtgaagggccaggaggcacgggaggtggggacagatggcagccaggcaggccggccggagggcccctgccgagcaggagagaggccttcatggccctcgctggggctccagacatccagaccagggtgccagctcccctcggccacctgcctgctgccccccaagggctacaggtatgccgccgtcatcctcctgtggggccttggagcctgggctaccaggaaggggcaaacccagcttcgttcagactctgcctggaacaacagcagggactgcgtttccgga

SEQ ID NO: 7656 - protein, 83 aa, Homo sapiens [sequence omitted]

SEQ ID NO: 7657 - DNA, 301 bp, Homo sapiens
acgcgttcaacacgaacgggaacaagggtgtggcgtgcgggctgggcaacattcagaagatccgcgacggtgaaccccttggcgcaggccgcgtctccgctgagtccgacttcggcgcgccggccgacgacttcctcaactaaggaggctgaatcatgagtgactgtttcaacgccatcaccctcgccgtgtgggtctacgtcctgatcccgttctggatggtctggggctactactggattaaggacaagcgggccaaacgccgcgaacgtcagcgcatcgatgagctgatcgccaagga

SEQ ID NO: 7658 - protein, 52 aa, Homo sapiens
TRSTRTGTRVWRAGWATFRRSATVNPLAQAASPLSPTSARRPTTSSTKEAES

SEQ ID NO: 7659 - DNA, 357 bp, Homo sapiens
gaggaagaagatttcggtaagtaccccttcatcaagaagggctatattgggccaattgaactgcttaacaatgacattgagtactatgttgatccccgtgcagtaacaggtacttggggggttattggtggcggcgaagtggatactcatcgtcttcatgcagtcgtaggtagagatttcattcatacaggtgttttagatgttggtactatccatgaaggcgatcccgccctcgacggaaacggcacattaacactggctcgcggtatcgagattggacatatcttccagcttggccgcaaatacattaacgctttcgatattgacgtcttgggtgaagatggtaaacccccacgc

SEQ ID NO: 7660 - protein, 119 aa, Homo sapiens
EEEDFGKYPFIKKGYIGPIELLNNDIEYYVDPRAVTGTWGVIGGGEVDTHRLHAVVGRDFIHTGVLDVGTIHEGDPALDGNGTLTLARGIEIGHIFQLGRKYINAFDIDVLGEDGKPPR

SEQ ID NO: 7661 - DNA, 285 bp, Homo sapiens
atccctggtaatcctgggcttttatactattatcaagaaatgctacatcatctacacttgaagcacccagattgggaaattcttggcatatcccatgccggaatgacattgaacgctcattctaatacaccgatattttctttacaagatcaagtagatcatcaggtagaggtaattaacaatttctcatgcaagaacaggaaaattattattatgggacattcggttggggcatacatcgaacaaaaagtatgcctttctaacaaactggttggctccggacaa

SEQ ID NO: 7662 - protein, 95 aa, Homo sapiens
IPGNPGLLYYYQEMLHHLHLKHPDWEILGISHAGMTLNAHSNTPIFSLQDQVDHQVEVINNFSCKNRKIIIMGHSVGAYIEQKVCLSNKLVGSGQ

SEQ ID NO: 7663 - DNA, 225 bp, Homo sapiens
tgatcatgttcaacttcgaaggctacgatcccgaagtcgacgtcaagcactacatgcgtcaggtgcaaacgctcactcgtcgttacggcgacctggtggagattgccccgaacatgaaagaggctgagttcaggaagctgggcaagatgacctcgttgctcaggaacaccacgctcaagaagtttggtaacctgatcttcaagcagcatagtcacaatggtgcac

SEQ ID NO: 7664 - protein, 73 aa, Homo sapiens
MFNFEGYDPEVDVKHYMRQVQTLTRRYGDLVEIAPNMKEAEFRKLGKMTSLLRNTTLKKFGNLIFKQHSHNGA

SEQ ID NO: 7665 - DNA, 257 bp, Homo sapiens
gcgtccttgaggaaagagcgcgagaacaaggtgctcgacgccaaacacgaagtcagccgccgtcaggctgacctcgacaaggcaatgaaaaagggtgacgcggacaaaatcaacaaacgcaaagacaagctcgcccagtcccgcaaggaactgcaggacgccgtcgaagaactcgacaagtaaaaccgatcagtggtcccgaaactgtttatggcaggctgggcaggcatcttcgaccttctgcaccggcggcccca

SEQ ID NO: 7666 - protein, 60 aa, Homo sapiens
ASLRKERENKVLDAKHEVSRRQADLDKAMKKGDADKINKRKDKLAQSRKELQDAVEELDK

SEQ ID NO: 7667 - DNA, 351 bp, Homo sapiens
cgggacgtcaccatgaagccgaccggctcgggggatgtggcgaacaaggtcatcacccatattccgtttaacatcgtctcccaggcgactcatccattccttcgtaccttggacgatgtcaagcgcatctctttggcgaccgacgggctcggccaccaggtcctgctcaagggctaccaggccgagggccacgactacgcacaccccgactacggcggcaacgtctcccaccgtgccggcgggatgaaggatctcgagaagctcaccgagtcgggcaggcagtggaacaccgatttcggcattcacgtcaacctggtggagtcctatcctgaggcgaatcacttcggcgac

SEQ ID NO: 7668 - protein, 117 aa, Homo sapiens
RDVTMKPTGSGDVANKVITHIPFNIVSQATHPFLRTLDDVKRISLATDGLGHQVLLKGYQAEGHDYAHPDYGGNVSHRAGGMKDLEKLTESGRQWNTDFGIHVNLVESYPEANHFGD

SEQ ID NO: 7669 - DNA, 320 bp, Homo sapiens
gaattcccaggatgctggtggaaaagatcaattaaactgcatctctggatgcttttttttttctttttactgaatgggcagaaagactcctctgctagatttagagggaatctaccattataaaattgaatcaacaacaaaaagggataggtgtgatatgttgaaaagattctaccaaatctcctctaaactgattgctctttttaaaaaaatcttccagggtaacatctaccaacccacactctcatgccaaagtgcatcctggccccacacgggtggcaggcgggctgatccctacacatggtttctgagattgatca

SEQ ID NO: 7670 - protein, 82 aa, Homo sapiens [sequence omitted]

SEQ ID NO: 7671 - DNA, 288 bp, Homo sapiens
cggccgatgctgagctgcacatgacctgccccagctcggcccttccgcacacacctggattctcacagcccctccaagggtggcagagcaggagggtccccactcagcaccccatcagctcacgcaacgtcccccatactggttctgatggaggtgggtgtggaggggggcagcgagatggcttcctggggacagaagctggtctgcagagcacgagggtatgacagatcaaaacacacacacagacggcggaaatcgggcagcagctggaagtcagaataaaaatgt

SEQ ID NO: 7672 - protein, 67 aa, Homo sapiens
MTCPSSALPHTPGFSQPLQGWQSRRVPTQHPISSRNVPHTGSDGGGCGGGQRDGFLGTEAGLQSTRV

SEQ ID NO: 7673 - DNA, 258 bp, Homo sapiens
gtcgaatatccatgcagcgatctgtgtttcctgaagggtctctggcagctgtctggggaaggagggaagctggcagagccgtgggtggaggcagatgccattgctatggagtgagcatggggaagggggtcggaggccttttggagatagatacagcaagacttggtgaaggatgaagttggggcaggtagaggaaaagcaatgagcttacggatgactggagactgactggagaagatgaccacccttgccattaac

SEQ ID NO: 7674 - protein, 84 aa, Homo sapiens [sequence omitted]

SEQ ID NO: 7675 - DNA, 275 bp, Homo sapiens
acgcgtcaaggacgccgaaacccgcctcgccaacctcgccaccgaacgccgccgcctcgaaacccaactcgccgacctcgacctctacggcacgggcaaatccggcaaggtcgccgccctgaacgtccgccttgccgagatcgacaagctcacaaaagcggcgggaatccgactgggctggcagcggaggcagcgctggaggaagcaagttgagtggacgggccgcaggccgagtagcaggcaggcacctcttgccttcgcccgcccccgacggc

SEQ ID NO: 7676 - protein, 70 aa, Homo sapiens
TRQGRRNPPRQPRHRTPPPRNPTRRPRPLRHGQIRQGRRPERPPCRDRQAHKSGGNPTGLAAEAALEEAS

SEQ ID NO: 7677 - DNA, 318 bp, Homo sapiens
  misc_feature (1)..(1): Wherein n may be a, c, g or t
ntgtatgacatttctttggggaacaatgagcaattgaccattgatgtggtcaatatgggcaacccccatgcagttactatcgttcctgatgtaattacagctgatgttgcgcgtttaggccctcaggttgaatcgcatgagcgttttccgcagcgtgtgaatgctggatttatgcaaatcattgatgaaaagcatgcgcgtttacgtgtgtttgaacgtggagtaggcgaaaccttggcctgtgggacaggagcttgtgcggctgcaatttcaggtatgcgccgtggtttactcgattcatctgttgagattgagtta

SEQ ID NO: 7678 - protein, 106 aa, Homo sapiens
  misc_feature (1)..(1): Wherein Xaa may be any naturally occuring amino acid
XYDISLGNNEQLTIDVVNMGNPHAVTIVPDVITADVARLGPQVESHERFPQRVNAGFMQIIDEKHARLRVFERGVGETLACGTGACAAAISGMRRGLLDSSVEIEL

SEQ ID NO: 7679 - DNA, 297 bp, Homo sapiens
  misc_feature (1)..(1): Wherein n may be a, c, g or t
  misc_feature (2)..(2): Wherein n may be a, c, g or t
nnacgcgtgattgcgctggacgcgaagataacaacagacgataactcctcgttccggcacaaggatctggcggacttgcgtgacctgaacgaagaagacccgctcgaagtggaagcgtcgaaacacggcctgaactacatcaaactcgagggcaacgtcgggtgcatggtgaacggcgcgggcttggccatggccactatggacatcatcaagtacgcaggcggaagtccggcgaacttcctcgatgtcggcggcggagcaaatgccgagcaggtgaaaaacgcatttcgcattttg

SEQ ID NO: 7680 - protein, 99 aa, Homo sapiens
  misc_feature (1)..(1): Wherein Xaa may be any naturally occuring amino acid
XRVIALDAKITTDDNSSFRHKDLADLRDLNEEDPLEVEASKHGLNYIKLEGNVGCMVNGAGLAMATMDIIKYAGGSPANFLDVGGGANAEQVKNAFRIL

SEQ ID NO: 7681 - DNA, 404 bp, Homo sapiens
  misc_feature (384)..(384): Wherein n may be a, c, g or t
  misc_feature (393)..(393): Wherein n may be a, c, g or t
tccggattgatcttcaagctgtaaggcaaggagaatggcaaggcgcggccttcatagacgttcggcccctcttcgggcagcggtctttgcatagggggcgtcaggaacgtcgagagtttgatttcacccttggcgctttcctgtgcggcatcgcgcaggaacacttcctgttctcggatgttttccatcaagcgggcgaagtgaaaatccagggtgtcgcgctgctcctcgagcatgcgcagcacgcccaggtagctgatacccagtaacagcggcaccagggcgccgagcaccagcaggcctttattcagacgcgaggaactgctggcgagtttttccaggaaagcgttgggcgggtgcattactgcgcctgggcgaaggtgnaggggctgnctgtgaacaca

SEQ ID NO: 7682 - protein, 120 aa, Homo sapiens
MHPPNAFLEKLASSSSRLNKGLLVLGALVPLLLGISYLGVLRMLEEQRDTLDFHFARLMENIREQEVFLRDAAQESAKGEIKLSTFLTPPMQRPLPEEGPNVYEGRALPFSLPYSLKINP

SEQ ID NO: 7683 - DNA, 204 bp, Homo sapiens
caattgctaaatgttaataagcagaaggagtaacatggtttctggcgagaaaaatagtagggtctttgggaatcttaagaattatgcagaattagaaagaaggcagaaagagaactctaggtcaagaggaagtggtaaaagcaagaagcaacaggatgaggctgggtcggagctttctagacatgacaaggtgaactgtgtaca

SEQ ID NO: 7684 - protein, 64 aa, Homo sapiens
MLISRRSNMVSGEKNSRVFGNLKNYAELERRQKENSRSRGSGKSKKQQDEAGSELSRHDKVNCV

SEQ ID NO: 7685 - DNA, 331 bp, Homo sapiens
aagcttatctttctatattttttaagaaatttgtcgttagtcaaaaatattttaatttcatgataggatttcaaataaaaaataatctgaatccagagtttaaatgtttcatttattatgctttattagaagagacttgaagccattctaatattattaaaaatgcattgaaaacagcattattgttgaatgtagcttttttgcttttgatttcgattcactgccactaattctttttttttttttttttttttgggtctttgtcccaaaagctggggtctttttggcaattgaggaaaaacagttgggatttaccatttttgatcctttt

SEQ ID NO: 7686 - protein, 53 aa, Homo sapiens
MVNPNCFSSIAKKTPAFGTKTQKKKKKKRISGSESKSKAKKLHSTIMLFSMHF

SEQ ID NO: 7687 - DNA, 268 bp, Homo sapiens
aagcttgggtcatttcacctctgtgagcctccacttctttatctgcaaaatgaaatcaaaatacttacctgagagaactgttatgaagactgtatgtattcattgccctcatcttcaggtttcacagacaggcaggctggagcattgcggggaagaaaacatctctcctactcttgatttccctttttgtttttgttttgtcagttctagtctggcttgaaggaaagaaggtgaattttcctattttaagatgtctcttcgtctaccc

SEQ ID NO: 7688 - protein, 56 aa, Homo sapiens [sequence omitted]

SEQ ID NO: 7689 - DNA, 397 bp, Homo sapiens
ctgcagaccccctccccacagccaatttgctgttccaaagctgagaccaaggcccgagggcacccagggagcgtgtgtgctgccattcaccctgcatctgtgctgatgctccggtcgtggtgccgggatttgctctcactggggaaggaaaaaacatgggggtatttgggggggcaaaaggggccctcccctggcttacacagcacacgggcagggctggggccagagcccagcactcggactgcaggcaagtgcatggcctccctgggcgtccacccgcactgcagggctgagctgagcaaatgttagtgggtggccagagctgcacgtgcacacacacactcaagcatgggttcccccccacaagttcacacacacactcacgtgtggattcacc

SEQ ID NO: 7690 - protein, 67 aa, Homo sapiens [sequence omitted]

SEQ ID NO: 7691 - DNA, 360 bp, Homo sapiens
  misc_feature (1)..(1): Wherein n may be a, c, g or t
ncaattgggtgagacggcagccgaattattactgcaacgaatagcaacaccccaactgccgatcgatcaacgtatcgtgacgcccagtattgttttgcgtgagtcgaccgcgccattggctgatgtgttcgcccaataccgctgaaccgaattgatgagtactgatgtatgccagcaaaagtagtggtaataggcagcttgaacatggacctggtcacccgcgccagccgcttgccgcgtgccggtgaaaccctgatcggccagacgttctccactgtacccggtggcaagggcgccaaccaggccgtcgcctcggcgcgcctgggggcgagtgtcgcaatggtggggtgcatcggtacc

SEQ ID NO: 7692 - protein, 64 aa, Homo sapiens
MPAKVVVIGSLNMDLVTRASRLPRAGETLIGQTFSTVPGGKGANQAVASARLGASVAMVGCIGT

SEQ ID NO: 7693 - DNA, 246 bp, Homo sapiens
agactggccacggaatcaggcacttgggcatgtccacagtccaccgtaagtatctacgtatatcacaagcccttaccgacctcacggtggtatctattcttgcagccagggctgcccctgcagagctaaaagcagaaattggttgtagaaacacccagagttccctgtcctgttatctaaggcagggtggacaaaggaagcagcttgacaacagccccgtacaacttacagggacaactcactggg

SEQ ID NO: 7694 - protein, 72 aa, Homo sapiens [sequence omitted]

SEQ ID NO: 7695 - DNA, 215 bp, Homo sapiens
aaattttgccccctgcatctctctgttgggtgcaaacatggagatgaaatatttgatttgcaggattccttcctcgctgccccagggtagaggagaacgtgcgaccctccccccactctgtcctctattagagaatcctggggttgagttccatggctggcagttaccattggaaacccattcattcataatgcatgactcgaccctccgaattc

SEQ ID NO: 7696 - protein, 63 aa, Homo sapiens
MNEWVSNGNCQPWNSTPGFSNRGQSGGRVARSPLPWGSEEGILQIKYFISMFAPNREMQGAKF

SEQ ID NO: 7697 - DNA, 372 bp, Homo sapiens
gggcccctcccttctaccccagcttcaatgtgtttaccactgttcttcacgggccaccatctcccatcctttctttttacatgctggatatttctatcacattaaggatcactgacccaccagcaaaccttctcctgataaacattcatttgggactattgccttcagagaggcctgacacatcaaggcaaagccactgtcagctttggggaaggagctccccatctctcaccatcaaccctacacacacacacacacacaacacacacacactctctctcctacccttgcaaatatgggctaaagagggggagtgatggaggccccgtgtcagttagaacagctcattgttcctcatctatagaacctagg

SEQ ID NO: 7698 - protein, 78 aa, Homo sapiens
MLDISITLRITDPPANLLLINIHLGLLPSERPDTSRQSHCQLWGRSSPSLTINPTHTHTHNTHTLSLLPLQIWAKEGE

SEQ ID NO: 7699 - DNA, 364 bp, Homo sapiens
accggtcacgacggctcgttgtcgacgctgcacgccaatgcgcccagggacgccgtcgcccgtctggagaccatggtcttgatggcgggcatggatctcccactccgagccatccgggaacagatcgcctctgcggtggacttgatcgttcagcttacccgcctccgagacggcacgcgtcgcgtcacccatgtgacagaagtccaagggatggagggggacgtaatcactctgcaggacgtcttcgagttcgattactcggcaggtgtcgacgtccatggccgcttcctggggacgacgatccccacaggtattcgcccgcagttcaccgaccgcttcgccgacctcgggatcgcccttccgc

SEQ ID NO: 7700 - protein, 121 aa, Homo sapiens
TGHDGSLSTLHANAPRDAVARLETMVLMAGMDLPLRAIREQIASAVDLIVQLTRLRDGTRRVTHVTEVQGMEGDVITLQDVFEFDYSAGVDVHGRFLGTTIPTGIRPQFTDRFADLGIALP

SEQ ID NO: 7701 - DNA, 345 bp, Homo sapiens
  misc_feature (1)..(1): Wherein n may be a, c, g or t
  misc_feature (2)..(2): Wherein n may be a, c, g or t
nnacgcgtgcagggttccagatggtggcagtggcacacggtattatttattcagacctcttctctcccgcattctcttagtagcaggagatttcacatgcaggagccaatgtacatgtatttactttgctgtattctgtttttttgtgtggtttttttttttttttttttgaaaaaaaaattgcccccttggcccccaaaaaggaagacaaggggcacaaccccccccacaaaaccccccttctccaaaggaaaaaaaaatctcccgccccccccccccaaaaggggggaaaaaaaaaccccacccccccccccggggaaatttttttttttttttattttaaaa

SEQ ID NO: 7702 - protein, 115 aa, Homo sapiens
  misc_feature (1)..(1): Wherein Xaa may be any naturally occuring amino acid
XRVQGSRWWQWHTVLFIQTSSLPHSLSSRRFHMQEPMYMYLLCCILFFCVVFFFFFLKKKLPPWPPKRKTRGTTPPTKPPFSKGKKNLPPPPPKRGEKKTPPPPPGKFFFFFILK

SEQ ID NO: 7703 - DNA, 190 bp, Homo sapiens
ccatgggtctgtccctcccactgtcccatctttgccactcatctgctgccccccactcccggaccccttttggaggtcagtctcattctgtggaaaccctggcttcctggttcgagatgccccctctggcccacgtgtctgacatcacgtaccacaacactgtggccatcattcaggattttttatgaca

SEQ ID NO: 7704 - protein, 61 aa, Homo sapiens [sequence omitted]

SEQ ID NO: 7705 - DNA, 366 bp, Homo sapiens
aagcttgtcccagttggatatggtatcaagaagctgcaaatcatgatgaccatcgtcgacgaccttgtctctgtcgacactctcattgaggactatctgtgcgctgagccagttaacgagtacgtacagagttgcgacatagttgccttcaacaagatctaggcgtgacttccgatcagtccttcccctggggtgctggcgatggtggtggctgggcaatgcaccagcctaatttatccatagctatatgtctgctttgtgtggccagtgatattgccgtgagtatttttggatcctattcgagtcgaatgtaccagtaccagagttaatttgctttaattcgaaacaccgttccagttggaattc

SEQ ID NO: 7706 - protein, 53 aa, Homo sapiens
KLVPVGYGIKKLQIMMTIVDDLVSVDTLIEDYLCAEPVNEYVQSCDIVAFNKI

SEQ ID NO: 7707 - DNA, 301 bp, Homo sapiens
gggccatgagaggaaaccagaagcccagagcatcttgaaggcaggctttattacttatttggctctgctggtaagatgcctctggtaaggcatcatgtgcaaagcaggtcccatgcaagcggtgcaggcagccccatgatggagctgcatggggtttgttcatagccacaaagaaaatcttataagtggattagtttagggtttattttaaaagaaaagagaagcatagctgtggtgatctcttgcttaatgactaatgttaagctggcatccctgctttcctgtgtgtgtgtatgaagat

SEQ ID NO: 7708 - protein, 54 aa, Homo sapiens
MNKPHAAPSWGCLHRLHGTCFAHDALPEASYQQSQISNKACLQDALGFWFPLMA

SEQ ID NO: 7709 - DNA, 244 bp, Homo sapiens
  misc_feature (1)..(1): Wherein n may be a, c, g or t
nccagagaggcggacaggaggctctgccaagtcagttaaagccagaaatggttcgtggcctcccagcaccttccttcctgggagctgagggcagcagggggcatggctgtgcctccgcctccctcccccttgacttcctccgtatgtctctttgccatctctctctgtgcttcctgtctgtctatccatttgcccatttgttgagttaaggggaaggcagccaccacggccccactccacgcgt

SEQ ID NO: 7710 - protein, 63 aa, Homo sapiens
MDRQTGSTERDGKETYGGSQGGGRRRHSHAPCCPQLPGRKVLGGHEPFLALTDLAEPPVRLSG

SEQ ID NO: 7711 - DNA, 258 bp, Homo sapiens
aagcttccatggtaccgaggaaaggaatggacctatcttcggggtggcctgacaacgctcgaccgggactacgggtggatcaacaacatccaccatgacattgggactcatgtcatccaccatctcttcccgcagatcccacactaccatctcattaaagcaacagaagcagccaagccggggctgggaaattacttcaaaaaaccgcaaaagtctggccctctccccttgcatctacttggggatctgggtcagaac

SEQ ID NO: 7712 - protein, 86 aa, Homo sapiens
KLPWYRGKEWTYLRGGLTTLDRDYGWINNIHHDIGTHVIHHLFPQIPHYHLIKATEAAKPGLGNYFKKPQKSGPLPLHLLGDLGQN

SEQ ID NO: 7713 - DNA, 379 bp, Homo sapiens
acgcgtggcgtggatctacttgggtatcgcctgaaagttcatcctggagatctgtgtgcctagcacgctggaaactgttttgaagactgtaggtttcattgtcctcgcggcccttccgttggtgatcctctggttcacccttcggcgaatgtcagcaactgctcgctcgtccgtgaaatcggggctgcatttgcatgctccgcgccggatttccggtaggtccatgaccttggtgatggtggatggaaaagaggatcgggagcactacttctttgatgcggcgtccttttacctacggcgtgggccggtgccacggcggttccgctttcgcagatcaactcagtcactcgcacctccgacaagatctacggacgttatg

SEQ ID NO: 7714 - protein, 77 aa, Homo sapiens
MSATARSSVKSGLHLHAPRRISGRSMTLVMVDGKEDREHYFFDAASFYLRRGPVPRRFRFRRSTQSLAPPTRSTDVM

SEQ ID NO: 7715 - DNA, 309 bp, Homo sapiens
  misc_feature (309)..(309): Wherein n may be a, c, g or t
cgtacgccagatcgcgctgaacccgcagcagcaggatttgcgtcgcctgctgaaccagaagctgctggaaaaagccgacatgatgcgcacctacaccgacaacgcgccgccggtcaaagccctggatgcgtcgattcgtgcgatgcaagcccaggtcgccagggagaaccacccggggcaatcttccgaaaaccggcgccgaacaccctggaaatccacttgcagcgcgtgctgctggacgagtcgagcaacaacctggcgctgcgcacccaacttgtgcagcagcaaaaacaactggtgaacctcgan

SEQ ID NO: 7716 - protein, 73 aa, Homo sapiens
MMRTYTDNAPPVKALDASIRAMQAQVARENHPGQSSENRRRTPWKSTCSACCWTSRATTWRCAPNLCSSKNNW

SEQ ID NO: 7717 - DNA, 445 bp, Homo sapiens
gggccccgagaaagacgcagcaaggaggggaagggcagaagcaaaacccatcggggggggggggacatctacatgccatctttggtgctgggaacaagggacagtatttcagcagggggaggccatgggtcacagcgaaaacgttccaggtagctggaccaacatgaccaagggggaaaggcaaaaggggtccatgctgtctgggacctaggctgggtggggctgggttaggcctcacatctagaaggccccaaatggcccaagttcttgggccttgcttgcttgtctctaactttccttctgtggctcctaatggtgaaggcctcccatgctcctgtttgggaagaattatgcaattattcctaaatggagtgcatgtcagcagccctggcactgaaaagggaagacatattggaggaggagaaacctttcacccagccctaaa

SEQ ID NO: 7718 - protein, 63 aa, Homo sapiens [sequence omitted]

SEQ ID NO: 7719 - DNA, 398 bp, Homo sapiens
  misc_feature (1)..(1): Wherein n may be a, c, g or t
natgacatgaggaggacaagtaagaaaaaggagaaggaggtgttattatatctgttatttagaaaattattggggactatgtgagcaatgggctggcatcatgtgacagagagctagtaggatgggactgaacaaatgagaggtgagaaaatagaaatagtgagtacagaatagcattattctttcaagaagtttgggccagagagagagagtacattacattacattgttttgttttgtatctgggaacaaaagcaatatatagtaagtctggaaaaaatagaaaatcagagaaagcataaattatagactttaataacagcatagaagaaattgacatgattatatttactagggggggaagacacatttatttaagaagggaagagatgtaggat

SEQ ID NO: 7720 - protein, 61 aa, Homo sapiens [sequence omitted]

SEQ ID NO: 7721 - DNA, 276 bp, Homo sapiens
accggtttagggtctgtatacgacaggtataatcccaggactatccttttatctataaacgcttccacacatcccacacatgttacgaaattccatacgcaagataacaaaattctggctacggcgagtgacgatagagtgacaagactttgggatatatccaacgcatatgagccacaattagagctcaccggagctactgactatgttcgtaccttatcatttatcccaacagccccacatttggttgcaacaggctcatacgacggtttgatc

SEQ ID NO: 7722 - protein, 92 aa, Homo sapiens
TGLGSVYDRYNPRTILLSINASTHPTHVTKFHTQDNKILATASDDRVTRLWDISNAYEPQLELTGATDYVRTLSFIPTAPHLVATGSYDGLI

SEQ ID NO: 7723 - DNA, 360 bp, Homo sapiens
aaattttcaagggttgttatgtggttgtcatttgctaatgtgatgaacaagtaattcaagcaattatcttttaagatagttatatatttggtcagtttttactattttacgtaattatttaaggggtgagtatttttcatatcatttattcctaaatgtcactgatagcatggttattggaaataagcaaaattaatctcattggtacagattttagggcctatatatgttgcttaaattactttagaaatttttttcttgaaacgaaatgctctgtatataggacattaaccatgaattttgttattggttttttaaaaaatttaatttcacttgaccaaaattgcagtcatggaaaat

SEQ ID NO: 7724 - protein, 68 aa, Homo sapiens [sequence omitted]

SEQ ID NO: 7725 - DNA, 363 bp, Homo sapiens
  misc_feature (1)..(1): Wherein n may be a, c, g or t
  misc_feature (2)..(2): Wherein n may be a, c, g or t
  misc_feature (3)..(3): Wherein n may be a, c, g or t
  misc_feature (67)..(67): Wherein n may be a, c, g or t
  misc_feature (85)..(85): Wherein n may be a, c, g or t
  misc_feature (86)..(86): Wherein n may be a, c, g or t
  misc_feature (331)..(331): Wherein n may be a, c, g or t
  misc_feature (353)..(353): Wherein n may be a, c, g or t
nnnatttctatcgtgtgttagacactgacagtgttagacagattatcgaggcagaaaactaacaaanttctggacttaaatgganncactgatcagttagacctaatagacatctacagaacattccacccatcagccacagaatatttattcttttcagctgcacacagagcatactccaagatcaagcacatgcttggccataaagtaagtctcaataaattttttaaagtcagaatcataccagtcatactcatggaccacagtagaataaaaatagaaatcagaactcagaacatctctcagaactacataattacatggaaattanataacttgcttttgaaatcacntttgggggta

SEQ ID NO: 7726 - protein, 114 aa, Homo sapiens
  misc_feature (16)..(16): Wherein Xaa may be any naturally occuring amino acid
  misc_feature (22)..(22): Wherein Xaa may be any naturally occuring amino acid
  misc_feature (104)..(104): Wherein Xaa may be any naturally occuring amino acid
  misc_feature (111)..(111): Wherein Xaa may be any naturally occuring amino acid
TLTVLDRLSRQKTNKXLDLNGXTDQLDLIDIYRTFHPSATEYLFFSAAHRAYSKIKHMLGHKVSLNKFFKVRIIPVILMDHSRIKIEIRTQNISQNYIITWKLXNLLLKSXLGV

SEQ ID NO: 7727 - DNA, 174 bp, Homo sapiens
gtgcacctacgtcacccggctcgcgcgcaaccccgccccgttatgttatggaagaatttagcttcttgctgggctggttattccgagccagcaactggctggctgccggatttcgtcccgtccgtagcgcttcggaagtcactctggcgtggcgctgctggatacttctgatca

SEQ ID NO: 7728 - protein, 56 aa, Homo sapiens
VHLRHPARAQPRPVMLWKNLASCWAGYSEPATGWLPDFVPSVALRKSLWRGAAGYF

SEQ ID NO: 7729 - DNA, 345 bp, Homo sapiens
accggtcacgcgccggcaacggtctggccaaccgcccagtacgacaactgggccctgacctatcgcaccctgctcaaccgcggcagcgtcggctcgaacatctacctgctgggcctcacgccgccgtcgccgcaaaactggctggccggtgacctggtggaaatcctgccgcgcaatggcccccaggcgattgaacacttcctcgccggcctgggcctgaacggcaacgatagcgtgctgctcgacggcctggcgcaacccctcgaccaggcactcgcgacccgccaactgccggacaaccgcacgcacctggtcggcctgcatgcccaggcactggtggacgcg

SEQ ID NO: 7730 - protein, 115 aa, Homo sapiens
TGHAPATVWPTAQYDNWALTYRTLLNRGSVGSNIYLLGLTPPSPQNWLAGDLVEILPRNGPQAIEHFLAGLGLNGNDSVLLDGLAQPLDQALATRQLPDNRTHLVGLHAQALVDA

SEQ ID NO: 7731 - DNA, 153 bp, Homo sapiens
  misc_feature (1)..(1): Wherein n may be a, c, g or t
  misc_feature (2)..(2): Wherein n may be a, c, g or t
nngtttaacgagaaggcgctggatgaaggcggcaagccgtatctggccggtggcctgctggacggttggtacgcaccgagcctgcgggacgatcacaacacggggctggggcgatggagcgagccggaggtggtgcagtttctgaagaccggt

SEQ ID NO: 7732 - protein, 51 aa, Homo sapiens
  misc_feature (1)..(1): Wherein Xaa may be any naturally occuring amino acid
XFNEKALDEGGKPYLAGGLLDGWYAPSLRDDHNTGLGRWSEPEVVQFLKTG

SEQ ID NO: 7733 - DNA, 383 bp, Homo sapiens
gtgcaccctacagtggctggcaggtgagagacgcagattctcaccttgagtagggagagaagggcatcgagttgatcagaattcaagaacggcctgtctggcctgttcatgaacagggaaaggaaacggaagaacattctgtctcttgtggcctcactgctgctggagagcagaattcaccacggtgaacacaactctctttttctgacagaatcagtgagaagtaactaggattgaggtttctctcctcatcacctagcatctttaatccgctagcctgcaagatggctgaggagcagaagatgtgattttgtccagttttactaaacaatagcttttcttcatcttaaaatataataagaaagcactataatgcttagatt

SEQ ID NO: 7734 - protein, 51 aa, Homo sapiens
MLGDEERNLNPSYFSLILSEKESCVHRGEFCSPAAVRPQETECSSVSFPCS

SEQ ID NO: 7735 - DNA, 442 bp, Homo sapiens
accggtgccgtcaataatttcaaaggcaacttcatcaacggttaccggcttttcagaaccaaattcgaccttggaaatgacaccctgttctatgaagatgtaagctccgaggagactgacaccgcttaccacatctatcaaattagtgttacttatacagtaatttttgagtggctctgggcgctatggtgccaccaagtcggccagggacttgttcattccttcattgacatcgatttgataagtcgtcatttttatctcggttaatatactgtttcgatgtcccgtcaattggaaagaaaagctacgctacataccagcaaatatgttgcttttatattcgctcatatcggagatcaattaccgacatactcttctctattcaacaagttctccgttctccgtcaagttacgtcgtttacgaacgataagaggctgatca

SEQ ID NO: 7736 - protein, 54 aa, Homo sapiens
MSRQLERKATLHTSKYVAFIFAHIGDQLPTYSSLFNKFSVLRQVTSFTNDKRLI

SEQ ID NO: 7737 - DNA, 297 bp, Homo sapiens
tccggaaaggtaaaacatgtgctgcgagatgtgtttaaactgcagaagttcagacctctgcagctggagactgtcaatgccaccatggcgagaaaggacatctttcttgtcatgcccacaggaggagggaagagcttgtgctaccagctgccagcgctgtgctcagacggttttacactggtgatttgtccactcatctctcttatggaagatcagctgatggttttacaacagttggggatttcagctactatgttgaattcttctagctctaaggaacatgtaaaatgtgtgcac

SEQ ID NO: 7738 - protein, 99 aa, Homo sapiens
SGKVKHVLRDVFKLQKFRPLQLETVNATMARKDIFLVMPTGGGKSLCYQLPALCSDGFTLVICPLISLMEDQLMVLQQLGISATMLNSSSSKEHVKCVH

SEQ ID NO: 7739 - DNA, 264 bp, Homo sapiens
  misc_feature (1)..(1): Wherein n may be a, c, g or t
nacgtccggaatcgatcagtagcagtttggaactttcgaggtgaactggtcacatcatttgaagatcacctgttgtggcaccctgactgcaacacaaacaacatatacattacaagtgatcaagatcttattatttcatactgcaaggctgactcaactgattcctcttcagaagaaaatgctggctctataaacataagcagcatactgaccggcaaatgcttggcgaaaataaaccctggaaattcgcgcaagcaaaaggat

SEQ ID NO: 7740 - protein, 88 aa, Homo sapiens
  misc_feature (1)..(1): Wherein Xaa may be any naturally occuring amino acid
XVRNRSVAVWNFRGELVTSFEDHLLWHPDCNTNNIYITSDQDLIISYCKADSTDSSSEENAGSINISSILTGKCLAKINPGNSRKQKD

SEQ ID NO: 7741 - DNA, 409 bp, Homo sapiens
agatctcgcagtacctggcttgctttttcacatggcagcgaccacttggtgctaagtagcagttagaagcttcctttagatgagtgtgctttctaatttggtgcacttctctaggcttatagatttacatcatctgcctgacccaagtagtccttcgaagtgtgtcctttattttagcattgcaagtaacttcatatgtgatctcaatttgtctctgtaacaactctctcttcaacttcacaaactgctcttcaaaaaagttatatgattgactagtatacacatagaaaaatgtcagcatcactggtcattgggaaatgtgcacaccactggaatcactcaaattaaaaagactgacaatactcaatattggagaatatatgaaagtactggatgtctcatatattgg

SEQ ID NO: 7742 - protein, 58 aa, Homo sapiens [sequence omitted]

SEQ ID NO: 7743 - DNA, 180 bp, Homo sapiens
  misc_feature (1)..(1): Wherein n may be a, c, g or t
  misc_feature (180)..(180): Wherein n may be a, c, g or t
nacggctacggcgggcacggaatcggccacgaaatgcacgaggacccttacctggcgaatgaggggccggcaggccgcgggccgctgatccaaaagggatccgtgctggcgatcgagccgatgctgaccttaggcacctacgacactgccgtccttgacgacgactggacagtgatcacn

SEQ ID NO: 7744 - protein, 60 aa, Homo sapiens
  misc_feature (1)..(1): Wherein Xaa may be any naturally occuring amino acid
XGYGGHGIGHEMHEDPYLANEGPAGRGPLIQKGSVLAIEPMLTLGTYDTAVLDDDWTVIT

SEQ ID NO: 7745 - DNA, 459 bp, Homo sapiens
  misc_feature (1)..(1): Wherein n may be a, c, g or t
  misc_feature (2)..(2): Wherein n may be a, c, g or t
nntgatcatggctagcttggtgacgggcatagccgtaagccccacaggaggctccatagacattatttgtagactattgtgtttgctttttatgtcgttgactttctctccctttaatagttaagtttatacgtcaaatttctcttctatacttttccaaaaaaaaaaaccatcttcacatcaatggcattcaaagtaagaaacagggcagggataaaaggatagatagcaatggacatggccaaccagttgctagatgaattagcacatggaaatttttcccacctaacgctaaacttgtcccaaaatggtagggaaattgctatcttacagaagcaattgaccggatttgatgataaacagctagaaacgtttgtagaacaacacccggctatgcccaatgatacgagattcaaaatcatgtgtacatcctttttaaattatgcccgagatgtcgac

SEQ ID NO: 7746 - protein, 76 aa, Homo sapiens
MDMANQLLDELAHGNFSHLTLNLSQNGREIAILQKQLTGFDDKQLETFVEQHPAMPNDTRFKIMCTSFLNYARDVD

SEQ ID NO: 7747 - DNA, 340 bp, Homo sapiens
tcatgaccctttagcccttgggtcaattggggtccctgagccattatcactgtgtttctgtgctataatgtgaatgaggacagtgagaaagcagtgggacagatgctctccagggccccagctatctctgacgttctgtttgcacatctctgtcgcgccgtcttggaggaggctgcatggaggctgatagaagaacagacagactcctgctgcaggcagaagtccatctgctggcagagatagaagccaagtttcctagctccctcttgctctccttccctccctcccagcactagttgagggagctgtgatctgctcagatgcccaggtgagagcaggt

SEQ ID NO: 7748 - protein, 54 aa, Homo sapiens
MDFCLQQESVCSSISLHAASSKTARQRCANRTSEIAGALESICPTAFSLSSFTL

SEQ ID NO: 7749 - DNA, 281 bp, Homo sapiens
cttactcttttattatacatcagaaaaaaaatgtttcggagctaaactgggaccgggttatgcaaaggaaactttgcataacaatggtttggtaccatacaccagattgtgggggggacaaaagaaacttccccagttcctgcgctcattttctcctgatcttcaccttcagagtccactggagcttaccttctgggcacggtatgttctgcggtaaccggaggggcaactcaaattcgccgagcgacgccaaaggtgagtgcagatgcaggttctccgga

SEQ ID NO: 7750 - protein, 74 aa, Homo sapiens
MQRKLCITMVWYHTPDCGGDKRNFPSSCAHFLLIFTFRVHWSLPSGHGMFCGNRRGNSNSPSDAKGECRCRFSG

SEQ ID NO: 7751 - DNA, 447 bp, Homo sapiens
  misc_feature (1)..(1): Wherein n may be a, c, g or t
  misc_feature (2)..(2): Wherein n may be a, c, g or t
  misc_feature (202)..(202): Wherein n may be a, c, g or t
nnagatcttcggggcagcagagcaggtgctcgggcccacacatggggtgcaagagtaggggtgtgccttggtgccccttgggcaccgacagcctcctcacagcctcagtggcggggtcatggcacaggcctgcccctgaccccaagaaccagaaagccaggagcagctggggagggccctggcccgggagagacagcggtcnctgtttctgaaccccatcccagccatggcctgtgtctgggccagcatccccgaccagacagggccagccgccctctctcaaagtccccagcaccccttcaagcagtatccggttcacaccctcccacagcctgtcctccatccccacgtgtcgggctcagcttccgcaccactcagcccccacccaggggcgggcttttatcagccccagatcctgctctgacgtccccccgcccggagaagctt

SEQ ID NO: 7752 - protein, 149 aa, Homo sapiens
  misc_feature (1)..(1): Wherein Xaa may be any naturally occuring amino acid
  misc_feature (68)..(68): Wherein Xaa may be any naturally occuring amino acid
XDLRGSRAGARAHTWGARVGVCLGAPWAPTASSQPQWRGHGTGLPLTPRTRKPGAAGEGPGPGETAVXVSEPHPSHGLCLGQHPRPDRASRPLSKSPAPLQAVSGSHPPTACPPSPRVGLSFRTTQPPPRGGLLSAPDPALTSPRPEKL

SEQ ID NO: 7753 - DNA, 388 bp, Homo sapiens
  misc_feature (377)..(377): Wherein n may be a, c, g or t
tgatcatggcattagtctatttcccatataagacactttaacatattacaaatcttaacagcagaatgttagtctctgccccttctgacacgacagctagctcacttgaaggttcctgcatattgctgcatgacctgtggttgttggtccttttgtcatcgaaggatagaaactgtacaagtatctctggtgatgggactaagggttccatgttgtttgtagttaggtattatctctgtgtccaacaatagtaattatgtagacattcaagcaatataaaaagaaacccaagagcttttctgtaaatcagcaatatatatgcctaagtcagcgtatagttgtaattaatattagtattcgtggtattatgttggtgncaaagtaagtg

SEQ ID NO: 7754 - protein, 61 aa, Homo sapiens [sequence omitted]

SEQ ID NO: 7755 - DNA, 273 bp, Homo sapiens
acgcgttctgcgcttagctctattattcctgttaatactgggttagccaaaggtattacgcgattaatgcctgatctagaaggtaaattagggtgtaatgctgtgcgagtaccaaccttaaatgtatcggttattgatttggttttacgtacagaaaaagtagtgacaaaggaagaggtgaatcaaaagctgccgcaagcagcgaccttaaagtatgctggattacttgggtttacgaatgaacctcatgcttcggttggtttttatcatgaa

SEQ ID NO: 7756 - protein, 91 aa, Homo sapiens
TRSALSSIIPVNTGLAKGITRLMPDLEGKLGCNAVRVPTLNVSVIDLVLRTEKVVTKEEVNQKLPQAATLKYAGLLGFTNEPHASVGFYHE

SEQ ID NO: 7757 - DNA, 396 bp, Homo sapiens
cgcgtgggtctcagtaaagaaaatttgttgcttagaggatgcaccattagaaacacagaggctgttgtgggcattgtggtttatgcaggccatgaaaccaaagcaatgctgaacaacagtgggccacggtataagcgcagcaaattagaaagaagagcaaacacagatgtcctctggtgtgtcatgcttctggtcataatgtgcttaactggcgcagtaggtcatggaatctggctgagcaggtatgaaaagatgcattttttcaatgttcccgagcctgatggacatatcatatcaccactgttggcaggattttatatgttttggaccgtgatcattttgttacaggtcttgattcctatttctctctatgtttccatcgaaattgtgaagctt

SEQ ID NO: 7758 - protein, 132 aa, Homo sapiens
RVGLSKENLLLRGCTIRNTEAVVGIVVYAGHETKAMLNNSGPRYKRSKLERRANTDVLWCVMLLVIMCLTGAVGHGIWLSRYEKMHFFNVPEPDGHIISPLLAGFYMFWTVIILLQVLIPISLYVSIEIVKL

SEQ ID NO: 7759 - DNA, 309 bp, Homo sapiens
  misc_feature (1)..(1): Wherein n may be a, c, g or t
  misc_feature (2)..(2): Wherein n may be a, c, g or t
nnacgcgtgaatgttgaagggattttgactgcggacgaaatccacgaaattgaacatcacattggtcactatccgtacccacgtgcagcatctttggatgctttgaagtgtgtacaacgccgtaatggctgggtagatgacgcgcagctaaacgccattgctcagttattgacaatcagtgttgctgatttggaaggtgttgcaactttctataaccgtatttaccgtcaacccgtgggtcgtaacgtcattttactttgtgactcgattgcatgtttcttgatgggtgcggaaacgttagcagaagct

SEQ ID NO: 7760 - protein, 103 aa, Homo sapiens
  misc_feature (1)..(1): Wherein Xaa may be any naturally occuring amino acid
XRVNVEGILTADEIHEIEHHIGHYPYPRAASLDALKCVQRRNGWVDDAQLNAIAQLLTISVADLEGVATFYNRIYRQPVGRNVILLCDSIACFLMGAETLAEA

SEQ ID NO: 7761 - DNA, 223 bp, Homo sapiens
  misc_feature (134)..(134): Wherein n may be a, c, g or t
  misc_feature (186)..(186): Wherein n may be a, c, g or t
gaattcaaggagaaaccagagactttcaccaagcaagagaggaatttgccagtgacaatctgctcaacatggatgaatcagtaagagagacagagatgaagctcttgtctggtgagtcagaaaactcagggatnagccagtgttgggagacggcagctgacaagagagtgggggggaaggacttantgagcaagagggggttcaggaaatcttcccaggttag

SEQ ID NO: 7762 - protein, 51 aa, Homo sapiens
  misc_feature (22)..(22): Wherein Xaa may be any naturally occuring amino acid
  misc_feature (40)..(40): Wherein Xaa may be any naturally occuring amino acid
MDESVRETEMKLLSGESENSGXSQCWETAADKRVGGKDLXSKRGFRKSSQV

SEQ ID NO: 7763 - DNA, 322 bp, Homo sapiens
  misc_feature (1)..(1): Wherein n may be a, c, g or t
  misc_feature (2)..(2): Wherein n may be a, c, g or t
  misc_feature (67)..(67): Wherein n may be a, c, g or t
nnggcagtgatgtcgcagccccacgaacgcgggcgcaatgtgggcccggtggtcagcgggatcatgntggggattttgctcggccgccccatcagtggtgtggtcggtgaggcgtatggctggcgggcggtgtacgccatggaggcggcgttcatgattccggtgtggttcatcgcagccaggctactgccgccgggcgtgccgagtaccaatctgtcttatccgcggctgctggcatcgctgtggccgttgatgcgcgataacagcccgattcggcaatcaatgatggtgcaggcgttgttgtgggcgtgcttcaacgcgt

SEQ ID NO: 7764 - protein, 107 aa, Homo sapiens
  misc_feature (1)..(1): Wherein Xaa may be any naturally occuring amino acid
  misc_feature (23)..(23): Wherein Xaa may be any naturally occuring amino acid
XAVMSQPHERGRNVGPVVSGIMXGILLGRPISGVVGEAYGWRAVYAMEAAFMIPVWFIAARLLPPGVPSTNLSYPRLLASLWPLMRDNSPIRQSMMVQALLWACFNA

SEQ ID NO: 7765 - DNA, 356 bp, Homo sapiens
ggatcccctgccaggcttggggaagtcttctcaccactggggctcctccctggccagacagagtccctcctgctgccacagtgtcccccagtgaccctctctgcctcctcatggctactctgggtgtggcctcacaccctgacccatgcacttcagccatttcgtgccagaaagggtggctgaagtaaccccatatcccattactccttcacagccactgccatccctggcagaaagggtgggagacaggcaggtctgggtggggagagcagtgtatctgcagagggacggtggcaccagaccacctctgccgagacagtacccatgtggatggggtgaaaggagccaagcctagg

SEQ ID NO: 7766 - protein, 69 aa, Homo sapiens
MHFSHFVPERVAEVTPYPITPSQPLPSLAERVGDRQVWVGRAVYLQRDGGTRPPLPRQYPCGWGERSQA

SEQ ID NO: 7767 - DNA, 393 bp, Homo sapiens
  misc_feature (360)..(360): Wherein n may be a, c, g or t
tccggacagttctttgctgtttcccggcaaagtccggctgcatacgattcgccctgtggccaagaaatcaagcagtccaattcagaccgaagagggatgaaatccgtcttgatgactttttgctttttacccttttcgtttcctaaatatccacaatcatcccaatcagcagatgctatgcttgaaactcgtcctgttaatacacatacgcaaggaagaaggtactcagacagcccatagaaagggtaacagaaaatcttccaagcaaaggtttcctttgtttttattgcatgagaaagggccacttggacagtgaagtccagatgacccttcatttaattgtttatctggggaaatgcncgcggtgtttctgttcctcctcatcttcaattg

SEQ ID NO: 7768 - protein, 111 aa, Homo sapiens
MKGHLDFTVQVALSHAIKTKETFAWKIFCYPFYGLSEYLLPCVCVLTGRVSSIASADWDDCGYLGNEKGKKQKVIKTDFIPLRSELDCLISWPQGESYAAGLCRETAKNCP

SEQ ID NO: 7769 - DNA, 299 bp, Homo sapiens
gagcatttcgccggcaaggaggggctgtacgccgtcctcgtggcccgcgagctcaaccccatctcgacgccgatcacccgggcgctgagctcctcgtcctccgcctcggtcccggtggagcgggccgcgctggcgctgctgacctacatcgaggactcccccgacggcttccggatccgctccagcggcaacgaccgggcctcgggcacctactccacgttcctggccgacgtcgccatccaggtctcgggcctgctggccgcgcagttctccgaccacggcatcgacccgcgcccggg

SEQ ID NO: 7770 - protein, 99 aa, Homo sapiens
EHFAGKEGLYAVLVARELNPISTPITRALSSSSSASVPVERAALALLTYIEDSPDGFRIRSSGNDRASGTYSTFLADVAIQVSGLLAAQFSDHGIDPRP

SEQ ID NO: 7771 - DNA, 302 bp, Homo sapiens
  misc_feature (294)..(294): Wherein n may be a, c, g or t
  misc_feature (295)..(295): Wherein n may be a, c, g or t
  misc_feature (297)..(297): Wherein n may be a, c, g or t
  misc_feature (299)..(299): Wherein n may be a, c, g or t
  misc_feature (300)..(300): Wherein n may be a, c, g or t
  misc_feature (302)..(302): Wherein n may be a, c, g or t
tctagacactgccatgtttcctgctgcctggactctggcctgctgcccagatcctggcctcagccctcactcccttcattcggctcaccagaccctggaatcttgccaaagcccagctgcaggtgcttatctgaatcacattcggcttttaaatcccccaagtggtagcccaaggggccattcccgctcgcctccagctctgattgccccgctgtgctacctacagtgagatggatacaccctgggctctttgcagcccctcaaagctgtgctctcacccaccaggtgaccccnncncnncn

SEQ ID NO: 7772 - protein, 71 aa, Homo sapiens [sequence omitted]

SEQ ID NO: 7773 - DNA, 290 bp, Homo sapiens
tccggatcatcaacatcaaatgctacgttcatgacccccacggacaggtcatctggggtatgtcctgggccaagctggccaggcaggccaccaatctgaaggtgaacttcttctttgaacggatcatgaagtacgaacgcttgacccgaatcctcttgcaggagatcccgatcaggagcatcagtctgagaagctgctatttcagtgacccagactgttcaatgagacccactctgatagatctcctgcccaccttccggcacactctgcagaaattaacttgtgaattc

SEQ ID NO: 7774 - protein, 77 aa, Homo sapiens
MSWAKLARQATNLKVNFFFERIMKYERLTRILLQEIPIRSISLRSCYFSDPDCSMRPTLIDLLPTFRHTLQKLTCEF

SEQ ID NO: 7775 - DNA, 399 bp, Homo sapiens
  misc_feature (40)..(40): Wherein n may be a, c, g or t
acgcgtgaattggccattcagtgccacagtgtcggcgttngcttggccaagtttatgaatgtgcgcttttgcctgtgtgtgggtggtcttagtcttaaagctcaagaagctgagctcaagatgcgtccagacattatcattgccacacccggtcgcctgatcgatcatgtgcggaacagcgcctcgttcggtatggaagatgtggagattcttgtgatggacgaagctgatcgtatgttggaagatggtttcgaggatgaattgaatgaaatcgtgcgcatgtgtcccacacagcgtcagaccatgttgttctcagctacaatgacagaagatgtggatcaacttgttcgtctgagtcttgaaaaacctgtgcgactatttgtggatcccaagcgctct

SEQ ID NO: 7776 - protein, 133 aa, Homo sapiens
  misc_feature (14)..(14): Wherein Xaa may be any naturally occuring amino acid
TRELAIQCHSVGVXLAKFMNVRFCLCVGGLSLKAQEAELKMRPDIIIATPGRLIDHVRNSASFGMEDVEILVMDEADRMLEDGFEDELNEIVRMCPTQRQTMLFSATMTEDVDQLVRLSLEKPVRLFVDPKRS

SEQ ID NO: 7777 - DNA, 426 bp, Homo sapiens
  misc_feature (1)..(1): Wherein n may be a, c, g or t
  misc_feature (426)..(426): Wherein n may be a, c, g or t
ntcagcttaccttttacagaggcaagcatatatgcagccatttaataggctcactcctaaaaaatgttcatgtattactttatttgttcacccccgcattgcaaaaagtcaatatgataaaaatgtaatgtgttctagaaaataatgagagaaattttatttgtttcagtgttgaaaattttctaaaacatgtaaggatttttgccctggagactgaaagacatatataaaaattatctcagtgtaattgtttatattgtcagatcaaaagttacttgttggttataaaaattgtgttctttaatatttaagaaaagagattggctatcactacttatatttggaatttgtttcacacctttctctaggtcataaaggtattttaaagttaaaatatgatacattgaatagaatttgttataagcn

SEQ ID NO: 7778 - protein, 50 aa, Homo sapiens [sequence omitted]

SEQ ID NO: 7779 - DNA, 691 bp, Homo sapiens
  misc_feature (674)..(674): Wherein n may be a, c, g or t
  misc_feature (684)..(684): Wherein n may be a, c, g or t
tcatgatgggacacctagagacatgttctcaggactctgctagacagacacacccaggctacctggtaaaagtcagttctcgtgagatcttgggcaacttgtcaactgcttggacgctggctcctcacctggatcacccacttccctagcagcattcagactgcataagtgtgagggtccagggcacaagaaagccttgaagggtcccctatagaggctggttgtctgtgctggaacaacgaactgcctctcctctgtgaggaagcaagcacatggggctgtccatgattagatcccatgctcaaagaattcacacacctgtctttgagtgttgggcgctaggaccatgaagcttcctcttaattacagaccccagtccagctttatagaccaagatgctcagctttccttaagccctcttccagaacaaatgagacacttacatgtttccatcttgattttgtgggaacactgtccagggctcaccaagagccattaggttcatctaattctcctgaaacccaggccttaaataagaggtcataacctcttgtcaatccatgtgtcgtcactctggtcaacatcttgtttgggatgcaggtgtgagggttagagtcaaaattcctagagtcaagatctgtttcttgactctggtgcagtcggagacaggcttntttttttttnttttttt

SEQ ID NO: 7780 - protein, 50 aa, Homo sapiens
MKLPLNYRPQSSFIDQDAQLSLSPLPEQMRHLHVSILILWEHCPGLTKSH

SEQ ID NO: 7781 - DNA, 436 bp, Homo sapiens
actagtgtcactcgggaaattccaagggttttagaagctcccttgccaggaaccagggacaggatggaagaccaaatacatatttcttctcatttcacaatatcgtaggatgttggggcaggatgattctggagggagttcttacctaagactagaacaatgtgtgagtgttagctagtgagagaacactgtacaaaaggcctgggtgggaaagcggatggctcattcaaggaactgaagaagaccctcaatattggcatagcttaaagagcttagagagtttaaaatatatattggggttggtaaatggtggggatttatgggcgggaaaacagggggggtagtgatggcctcgtaaactaaggaagggaattgggactgcctttggggcattgtgattcagccaaaaggtctaaagcggggagtaatatgatca

SEQ ID NO: 7782 - protein, 56 aa, Homo sapiens
MPQRQSQFPSLVYEAITTPPVFPPINPHHLPTPIYILNSLSSLSYANIEGLLQFLE

SEQ ID NO: 7783 - DNA, 417 bp, Homo sapiens
ggatccttagggtctaactgatcccaaactttcccagggccaaatggcttcttaacaagttactttaaaatactcccatccccaaaactcaccaagatcccacaccttctcagttttaaagggtcaaaagttgaaaattacaagacaatagcaagatttgcagcaaaagtgatctctggccaacagccgggagactttatgacaaattgcctagacatggccatttagagcaatcacctttaaatggtgcttcagacttcccctaaatgtctcctttatttgaacaatgtgtttatagggcctggggctgctgtgctgtctgtgtacgtgtgtgtgtgggtgtgtgtgtgtaaagagagagagagaatccaagcagaggaaaatgaccaacctcttatcttacagaccattcttatc

SEQ ID NO: 7784 - protein, 58 aa, Homo sapiens [sequence omitted]

SEQ ID NO: 7785 - DNA, 207 bp, Homo sapiens
tgatcacgggagcctgtgtttcccgatgcctggacccctcatgtcagcagaggagaggtctgacagctcttgggtggcctgctcgcagctctgcctgaagctgtggctggggagagatggacaccaaaggggcaggtttggattcaggtccccaactgttgccctctttgcctccctgctctctacagcaggcacactgcaaagctt

SEQ ID NO: 7786 - protein, 60 aa, Homo sapiens
MPGPLMSAEERSDSSWVACSQLCLKLWLGRDGHQRGRFGFRSPTVALFASLLSTAGTLQS

SEQ ID NO: 7787 - DNA, 412 bp, Homo sapiens
ctcaccctcgccggccaatctaatacttcattttctggatcatactttgtctctgccctctgctctcagcatattcaagccgagtccttagttattagaggtctgccaaatttaaacttaagatgtccttttcttactgtacagtactcctgtctgccttctgctcagagggcatatatagaatatccagaataaggcacctgctatatttttaagtgcttttgtaagagatcactataccacactgatgaaaaataaatgttgctccaggttctttcccaaagaaaaaggtggatgttgtaggggaagtagggaaaagatggaaacaaatcagaaagattgagatctaaccccaaaggaatcctacaaacgtcattcagcttttgacttgggagcattagtaaagggagaa

SEQ ID NO: 7788 - protein, 64 aa, Homo sapiens
MLPSQKLNDVCRIPLGLDLNLSDLFPSFPYFPYNIHLFLWERTWSNIYFSSVWYSDLLQKHLKI

SEQ ID NO: 7789 - DNA, 427 bp, Homo sapiens
  misc_feature (286)..(286): Wherein n may be a, c, g or t
  misc_feature (340)..(340): Wherein n may be a, c, g or t
ctcacatacattcacaaatattctctacaaaggtcttagatgagatgactacttacaaagatcattttccccaaattaatagagaagttcagtgtaacatcgatcaaaattcttgtggtttttgagggactttgataacttttgatatataataaagccccataaatgattaaaccagctttgaaaaataagtgcaaaggagctactaagacattctataaagccataataataaaaacagtaaggtgctggcacaagaatgtgcaaatagaccaatggaacaaantcacatcactcaagacggatccatgtacatgagggaacctgaaatcagatgagngtaccacagatcaataaagaaagaatggactatttaggaggtggtactggaaaaactgcctactatatggaagaaaataaaaccggt

SEQ ID NO: 7790 - protein, 50 aa, Homo sapiens
  misc_feature (41)..(41): Wherein Xaa may be any naturally occuring amino acid
MIKPALKNKCKGATKTFYKAIIIKTVRCWHKNVQIDQWNKXTSLKTDPCT

SEQ ID NO: 7791 - DNA, 426 bp, Homo sapiens
  misc_feature (133)..(133): Wherein n may be a, c, g or t
cctaacggcttgttgttggaaatcgctttaaaactgcatgaagtagattgccccatttatgagaattttatccgccaaaaaatgcctaaagacaaacaaatcaaagaagaggatctggtcgctatttttgcgngaagccctatagataatattgaagcctatgtggaagagattaaaaacgcttccattaaacgaaaactttttggcttggctaacaccattagagagcaagccctagaaagcgcgcaaaaatccagcgatattttaggcgctgtggaacgagaagtctatgcgttattgaatggcagcaccatagagggctttaggagcattaaagaagtgcttgaaagcgcgatggatcttattacagaaaaccaaagtttggggagtttggaagttactggcataccgactggctttgtccaa

SEQ ID NO: 7792 - protein, 142 aa, Homo sapiens
  misc_feature (45)..(45): Wherein Xaa may be any naturally occuring amino acid
PNGLLLEIALKLHEVDCPIYENFIRQKMPKDKQIKEEDLVAIFAXSPIDNIEAYVEEIKNASIKRKLFGLANTIREQALESAQKSSDILGAVEREVYALLNGSTIEGFRSIKEVLESAMDLITENQSLGSLEVTGIPTGFVQ

SEQ ID NO: 7793 - DNA, 265 bp, Homo sapiens
tgatcatgaattccagtaaaggcaatcggtttggtctttctttcttgaggatcttgaaggcattgatgagcttctgaaatatgtgacacaccgtagcttcccttcctgagtgttccatggacaagagcgcctctgccagggtcagagtggaattgtaccagaactcctcacttccgcccaggtgctgggcctgtgcgatcattttcttggcttgtccatagtttttctccttgttggccaactgtgcgaggaggagcaggcactg

SEQ ID NO: 7794 - protein, 67 aa, Homo sapiens
MIAQAQHLGGSEEFWYNSTLTLAEALLSMEHSGREATVCHIFQKLINAFKILKKERPNRLPLLEFMI

SEQ ID NO: 7795 - DNA, 378 bp, Homo sapiens
ggatcctggcaccaagggttgggctggagtgtcagctgcggaagggcctccatgtgaccagtgcgtgcagatgagtccaagccagaggcagaggaaagggccatggagattgtgatgctcggtttggggcttccttggccagcactggtggagtgttgagaccagtgggccccgcgaccccaacatagacacacataggctctgcagggcttgcacactgggtacctaccactccagagactctgcaagaaaggccaggtggctgaggctggcgctgtggctgcagcaccccctccacctccaccagtgggggatgtgtacaggatggagcagggcctttcctgcctacagcatgggggttcatactgcatccctagg

SEQ ID NO: 7796 - protein, 123 aa, Homo sapiens [sequence omitted]

SEQ ID NO: 7797 - DNA, 357 bp, Homo sapiens
  misc_feature (1)..(1): Wherein n may be a, c, g or t
  misc_feature (208)..(208): Wherein n may be a, c, g or t
  misc_feature (209)..(209): Wherein n may be a, c, g or t
  misc_feature (357)..(357): Wherein n may be a, c, g or t
natcaccatcacctcctccatctcctccacctctatcatcatcattacctcctccacgtctatcatcaccggcacctcctccatcttctccacctctgtcatcaccatcatctcctccacctgcactatcaccatcatcacctccatctcctccacctccatcagcaccatcatcacctcctctacctccattaccgccttcattttnnctttaaccgctttcaccaccatgaccacctactccacctccatctccaccatcatcacttcctccaccttctctatctccagcagcaccatcactggtaccttcatcaccgtccttgcccctttcttgcttatttctatttcctcagn

SEQ ID NO: 7798 - protein, 119 aa, Homo sapiens
  misc_feature (1)..(1): Wherein Xaa may be any naturally occuring amino acid
  misc_feature (70)..(70): Wherein Xaa may be any naturally occuring amino acid
  misc_feature (119)..(119): Wherein Xaa may be any naturally occuring amino acid
XHHHLLHLLHLYHHHYLLHVYHHRHLLHLLHLCHHHHLLHLHYHHHHLHLLHLHQHHHHLLYLHYRLHFXFNRFHHHDHLLHLHLHHHHFLHLLYLQQHHHWYLHHRPCPFLAYFYFLX

SEQ ID NO: 7799 - DNA, 262 bp, Homo sapiens
gtcgacgatcaaccgctgatcgtggaagagctctgtgaatttcttgaaagcagcggtttccgctgcgtcccgtgtgaatccagccagcaggccttgaagcgttttaccgaagacgccgagattggcctggtgctgtgcgatctgcatatgccggacatggacggcatcgagttggtccaggccctgcagaaggttgcgggcaagcagcgcgcctttgaggcgatcatgttgaccggccgtgcggacaagcaggatgtgatca

SEQ ID NO: 7800 - protein, 87 aa, Homo sapiens
VDDQPLIVEELCEFLESSGFRCVPCESSQQALKRFTEDAEIGLVLCDLHMPDMDGIELVQALQKVAGKQRAFEAIMLTGRADKQDVI

SEQ ID NO: 7801 - DNA, 327 bp, Homo sapiens
  misc_feature (327)..(327): Wherein n may be a, c, g or t
tccggatcgacccggacgaattccacggtccagccattgacttccaaatgctctttgacatacgccgtgacatgttcaatgtccaacttacgcatgtccacccgctcaccggtctcattgagtttgagctgcgagtagacgttgcggtagttctcgttgaccgactgctcatacgagatgtgcagaagcatcggtttgcggccatcctcggacggcattggcttgttgtacatggccgcttggcggaacatgttcagggtaaagcccgacttgaagttgtgcgacagggcagaaacacacagcatttctgaccggcgatgacccatn

SEQ ID NO: 7802 - protein, 108 aa, Homo sapiens
MGHRRSEMLCVSALSHNFKSGFTLNMFRQAAMYNKPMPSEDGRKPMLLHISYEQSVNENYRNVYSQLKLNETGERVDMRKLDIEHVTAYVKEHLEVNGWTVEFVRVDP

SEQ ID NO: 7803 - DNA, 531 bp, Homo sapiens
ggccgcatcccgcatctgggccgatggcgaatgggcaatttcagtcgcagacagggacatgacgatgccgttgtcgagaaggccatggcgacgaccggggtctccgagcttactgatagggcatggtcttccctgtcaggaggagagaggcaacgggtacagctggctcgtgccttggcacaggagcccgagatcttatttcttgacgagccgacaaatcaccttgacttgccacaccagatcgacctcctggagcgggtccgaggactcggcctgacgacggtcaccgtcattcatgacctcgacttggctgccgcctacgccgacgacctcatcgtgctcgactcgggtcgcatggttgctggcggaccggcgagcacagtgctgacgcctggccttgtccgtgaccactttggtgtcgacggtgaggtttggtcctcctcgaggcgcggcttcacctggaacgggctgcagacatgacgacgcgtatcgcagtatccctccgatgggacgacgccattgacttgagcc

SEQ ID NO: 7804 - protein, 159 aa, Homo sapiens
GRIPHLGRWRMGNFSRRQGHDDAVVEKAMATTGVSELTDRAWSSLSGGERQRVQLARALAQEPEILFLDEPTNHLDLPHQIDLLERVRGLGLTTVTVIHDLDLAAAYADDLIVLDSGRMVAGGPASTVLTPGLVRDHFGVDGEVWSSSRRGFTWNGLQT

SEQ ID NO: 7805 - DNA, 543 bp, Homo sapiens
caattgctacagtttttccaattagcagacatcaatcataacggactattaaattattttgaatttgaaaagttcattaaaatcttaaagaataggaaagaggtaaatatgatttggtctaaatttacaaaacctccacactcccacttatcatttgaaaatttttttcaatttttaattacagagcagcatgagcaagtggatcgtcaaactgcatggtcatattttattaagtacagagaaccgactcagctgacgatggggcaagatggttttaccaagttcttgaaggagcaaccatatttggtggaggttaaagaggagttatattcaaagccattaaaccattattttattgcatcttcacataatacttatttattggggaaacaaattgcagaaactccatctgtggagggatatattcaagtcctacaacaaggttgtaggtgcgtagaaattgatatatgggatggtgaaaatgggccagtggtatgccatggatttttaacgtcagctattcccttaaaaacagttatacgc

SEQ ID NO: 7806 - protein, 181 aa, Homo sapiens
QLLQFFQLADINHNGLLNYFEFEKFIKILKNRKEVNMIWSKFTKPPHSHLSFENFFQFLITEQHEQVDRQTAWSYFIKYREPTQLTMGQDGFTKFLKEQPYLVEVKEELYSKPLNHYFIASSHNTYLLGKQIAETPSVEGYIQVLQQGCRCVEIDIWDGENGPVVCHGFLTSAIPLKTVIR

SEQ ID NO: 7807 - DNA, 378 bp, Homo sapiens
ccatggcccaggacagccggcatatcggctacgactacggtacaccggtggcgccacagttcggcgcagccaagcccgcagcgtgctgccaggcgcaagcgacaaacaccggcccgtgggtggtgttcgaccatgtgcgttgcacccacgacacctttctgatcgacgtctttctcaaccagcccgatgccaccgcgcagcaggtcaatgccgacaacccgcactacgtcgggcgtttcagccgcatcggcatgggcctggtggatgacaagggccgttgcattacccagggcgtatcgcgcgcgttgaatgcggcgcgcagcaccaaggcgctgaacctgggaccgagtgacgcggcgcagttatcggtgaggcgta

SEQ ID NO: 7808 - protein, 125 aa, Homo sapiens
MAQDSRHIGYDYGTPVAPQFGAAKPAACCQAQATNTGPWVVFDHVRCTHDTFLIDVFLNQPDATAQQVNADNPHYVGRFSRIGMGLVDDKGRCITQGVSRALNAARSTKALNLGPSDAAQLSVRR

SEQ ID NO: 7809 - DNA, 389 bp, Homo sapiens
  misc_feature (217)..(217): Wherein n may be a, c, g or t
  misc_feature (230)..(230): Wherein n may be a, c, g or t
  misc_feature (350)..(350): Wherein n may be a, c, g or t
ccatggacacatttaccaatgcaacaaacctccacatcctgtaagtataccctggaacataatataatataataaaataaaatactattactagccaccacaaaaaaacactaaagtacatagaccattgacaaagcaaatacacaatcaagtctacataacaaccagctaacaacatgataacaaaatcaattctgcacatacgaatatcttgaanataaatggcctanatgatccacttaaaagcacagtggcaagttaaataaagaagcaagactcacctgtttttgtgttccagagaatccccttaccttaaatggaccccttttttattccttttccttcctgtnttgaaaaattccctaaaatcggaaatttattaagaaaaa

SEQ ID NO: 7810 - protein, 67 aa, Homo sapiens [sequence omitted]

SEQ ID NO: 7811 - DNA, 269 bp, Homo sapiens
ccatggagtggaaggcgatcctcggagtgacagaagctgtttgcgacacaaaaaatcaaagcgcttgtctctataacagaaacagcccccaggaaccaacaaaaaagacggaccccccaatgacattgttctttgacagcccaattttgaaatggggcaaaagactggaacaggcacctttaaaaggagggtccctcataacccgggagcctctgagaatcagctcacctcatccgtcgcgaggccacagcctagtgcctttcagatct

SEQ ID NO: 7812 - protein, 89 aa, Homo sapiens [sequence omitted]

SEQ ID NO: 7813 - DNA, 442 bp, Homo sapiens
  misc_feature (442)..(442): Wherein n may be a, c, g or t
tgatcacacccccgcactctagtccgagtgtcagagaccttgtctcaaaagaaaaacaaaagaaaagaaggaatagtacacacagagttgaatggcctcatggatccctcctacatggtattcccatcctctgcccctgccaaagaggtagattgtggtaatttcctcaacccatgcccaccccagatcagtcctggctttctctgtgccctgggaggctgatccctaagaactgcccttcaaatgagttttaaatcaagggaagccccccaaaaaaatgggggggcgggaaaaaaagaaaggctggggtatctgtttctcctgcctcctccctgttctgctgcccccttcatccactacagctcctcactggcagctcctgccccgccagcacaagcttgtgccaagctctggtgactcctcccctttcagatcaggactn

SEQ ID NO: 7814 - protein, 57 aa, Homo sapiens [sequence omitted]

SEQ ID NO: 7815 - DNA, 592 bp, Homo sapiens
gctagcatggcagtacttgtttccagcctggatttggttcccatgtatgctgtcagtcccttctataagacacaggcacacgatgctgatggccgtggtccacttcagaagtcatcgaaaggactgagctgctcctagatccctgtcctgcttagggagacagctgttcagggaaataagcacctttctattttctgtcatgtcgtatccatggtccaactctaggatctccttgctagaagggccagaccacaagctaggtgcccatttcctgaagggcttgggatgctccagcttggaagaacccctgtgttctaaggaaccctgaggagttcctccggaagaagccttgcatgttctaagaagggggtgtgacagcgaggacccatgcttggtcttatccagagccacattgatatcaagcatttggcataggggtctaagcactgtccgggaatggaagaggtagaacaaacttcccacctccagaaccatcctccacagccctgatcttcccaaacagaagcctcaaagtgggaagaggagagaggtcttaaacggactcctcccaattccaccatctctaagatct

SEQ ID NO: 7816 - protein, 127 aa, Homo sapiens [sequence omitted]

SEQ ID NO: 7817 - DNA, 349 bp, Homo sapiens
tggccatggacacagccagctgccccgtcgcatccctgtccatgctgcacagttacatggccccgttacggtgtggtgacagctggaggccagaatctctgaattctcacacccgggccaggctccctggcccttgtcatctctgggcaccaacactgctgggcagagcaaaactgggagggcgaggctcgctggggcctggggccacactaagtgtcggggccgtgttttggggcgcaccagcccaggaaataagtgctgcctttgtcaggggctctaagaacagggcctcctgaaaacgccaagtgctggggcctgggggtctgaatgctcaggaaaaactgggctt

SEQ ID NO: 7818 - protein, 96 aa, Homo sapiens
MDTASCPVASLSMLHSYMAPLRCGDSWRPESLNSHTRARLPGPCHLWAPTLLGRAKLGGRGSLGPGATLSVGAVFWGAPAQEISAAFVRGSKNRAS

SEQ ID NO: 7819 - DNA, 324 bp, Homo sapiens
ctcgagcgcaggatcgccgccactgcccgcgaggagggcgaatgggcccgcaaggccgagctggcgctgacccataaccgtgaggacctcgcccgcggcgcgctggccgccaagggccatgtgaccaagacccgcgagacgctggaagaccagctcatccagatccgtcagggcctcgcacagcaggacgacgacatcgccaagctgcaggccaagctcgccgatgccaagacccgcgagcaggcgttgcgctcacggcacgatctggcaaattcgcgcctcaaggtgaaggaatcgctctacgattcacgcatcaacgacgcg

SEQ ID NO: 7820 - protein, 108 aa, Homo sapiens
LERRIAATAREEGEWARKAELALTHNREDLARGALAAKGHVTKTRETLEDQLIQIRQGLAQQDDDIAKLQAKLADAKTREQALRSRHDLANSRLKVKESLYDSRINDA

SEQ ID NO: 7821 - DNA, 438 bp, Homo sapiens
  misc_feature (1)..(1): Wherein n may be a, c, g or t
nacgcgttatttttcgcgtgacataatagaaaaatatttcaactgggcatctttaacacatgttacaataaagttgagatgacttgtttatgcctttaaagtttgtaagtggaactagaagcgtctatgtgtgaaatgtttggctctgggaatgttctgcctgttaaaattcagcctccgctgcttaggccactggcgtatagagttttatcaagaaaatatggtttatcaattaaatctgatggactgtctgctcttgcagaattcgttggcactaatataggtgctaactggagacaagggcctgctacaataaaatttctcgagcaatttgctgcagtatggaaacaacaagaaagaggccttttcatcgaccagagcggggttaaagaagttatacaggagatgaaagaacgtgagaaagtcgaatggagtcat

SEQ ID NO: 7822 - protein, 110 aa, Homo sapiens
VELEASMCEMFGSGNVLPVKIQPPLLRPLAYRVLSRKYGLSIKSDGLSALAEFVGTNIGANWRQGPATIKFLEQFAAVWKQQERGLFIDQSGVKEVIQEMKEREKVEWSH

SEQ ID NO: 7823 - DNA, 336 bp, Homo sapiens
gtgcactgcgagcccaaacccgttacttagctgtgtagctctgggcaagttacagagctcctccatgcctcagtttcctcagctgcaaagtgggattaatacctattttataagatggccgtgaggatacattgagatgacgggacacacttagtgtggtgcctgtcttgtaaggcacacgatgaagggttgttatcggcactacgcttcctgttacggatgttctccatctgatcatggttggtttgcatctgtatttctatcccaagagaaggtcactctcctgaagtttcatttctggtttttcctggtggctgaagaccgaggagccttccc

SEQ ID NO: 7824 - protein, 62 aa, Homo sapiens
MIRWRTSVTGSVVPITTLHRVPYKTGTTLSVSRHLNVSSRPSYKIGINPTLQLRKLRHGGAL

SEQ ID NO: 7825 - DNA, 495 bp, Homo sapiens
  misc_feature (25)..(25): Wherein n may be a, c, g or t
atcctcgataacgtcgagggcgcanccgagcgcgccgaggccgggattctgctcttcggcaccattgacagctggctattgtggaacctcactggcggtgcgagggcgatgccgggacgtgaggctctgcacgctaccgacgtcaccaatgcctcccgcaccctgctcatggacatcgaaaagctggagtgggatgaggaactgtgcaaggaaatgggcatcccgatgtccatgctgccggagattcgcccatccctcggtgatttccgtaccgtgcgtacgcgttcgctctccggtgtgcctatccgcgccatcctgggtgaccagcagtctgcgatgtttggccaaggctgcttccgcgccggctctgcaaagaatacctacggaaccggattgttcctcctgctgaacacgggcaccaccccgaagttctctgagaatggcctgctgaccaccgtgtgcttccagcgtgagggcgaacgctagtctacgcgt

SEQ ID NO: 7826 - protein, 161 aa, Homo sapiens
  misc_feature (9)..(9): Wherein Xaa may be any naturally occuring amino acid
ILDNVEGAXERAEAGILLFGTIDSWLLWNLTGGARAMPGREALHATDVTNASRTLLMDIEKLEWDEELCKEMGIPMSMLPEIRPSLGDFRTVRTRSLSGVPIRAILGDQQSAMFGQGCFRAGSAKNTYGTGLFLLLNTGTTPKFSENGLLTTVCFQREGER

SEQ ID NO: 7827 - DNA, 435 bp, Homo sapiens
gaattcttaccactatttctaaagaacgaagataatgaactgtacagtttacagtctcctatcactgcacttactttagattcatgtgatgtagttcctggaaatggaatattacgtttgtttcactcttactttaaaatggtcaaacatctatccttactgaagattaacagtaaattcgacttattgttatgcagttgtttcccatcgttatccaatctaacaattgattgtaatagcaaatgtttcactaacgaacaggtagtcggcgaatcatattatttccaacagcgaagtttggatacagaagatgattttgatgactgcaattccatgacagaaacattatttgaagcgccatcagattcgaagataattactcctccgccgacatcttcagttgtattgtccttaaatctgaactatatttctaga

SEQ ID NO: 7828 - protein, 145 aa, Homo sapiens
EFLPLFLKNEDNELYSLQSPITALTLDSCDVVPGNGILRLFHSYFKMVKHLSLLKINSKFDLLLCSCFPSLSNLTIDCNSKCFTNEQVVGESYYFQQRSLDTEDDFDDCNSMTETLFEAPSDSKIITPPPTSSVVLSLNLNYISR

SEQ ID NO: 7829 - DNA, 466 bp, Homo sapiens
  misc_feature (79)..(79): Wherein n may be a, c, g or t
  misc_feature (118)..(118): Wherein n may be a, c, g or t
  misc_feature (385)..(385): Wherein n may be a, c, g or t
  misc_feature (453)..(453): Wherein n may be a, c, g or t
  misc_feature (456)..(456): Wherein n may be a, c, g or t
  misc_feature (457)..(457): Wherein n may be a, c, g or t
  misc_feature (459)..(459): Wherein n may be a, c, g or t
  misc_feature (460)..(460): Wherein n may be a, c, g or t
  misc_feature (461)..(461): Wherein n may be a, c, g or t
  misc_feature (462)..(462): Wherein n may be a, c, g or t
  misc_feature (463)..(463): Wherein n may be a, c, g or t
  misc_feature (464)..(464): Wherein n may be a, c, g or t
  misc_feature (465)..(465): Wherein n may be a, c, g or t
  misc_feature (466)..(466): Wherein n may be a, c, g or t
cgtacgggacttttgtgttaaactacaaaatgctgatttaataatgaagatctaaataaatggaaagacgaaccatgtntaaaggaaagactcaacatagtaaagatgtcaattatcncccaattgatatacagatttgacacaattttgataaaaattcaaacaataatttttgtagatatagacagattaatctgaaaatttttataaaagtacaaaaacactagaattgctgaaacaattttgaaagagaagaataaagtgggaggaatgagcctatccaacttcaaaatttattagataaccagagtaatcaagattgtgtggtgctggtgaagagataaacacacacatgccttatggaatagtatagaaaggccagaanacagaccacacaaacatgcctaactgatttttgctaaagatattaattcaatagagaaataatagctntcnncnnnnnnnn

SEQ ID NO: 7830 - protein, 53 aa, Homo sapiens
  misc_feature (15)..(15): Wherein Xaa may be any naturally occuring amino acid
  misc_feature (28)..(28): Wherein Xaa may be any naturally occuring amino acid
FNNEDLNKWKDEPCXKERLNIVKMSIIXQLIYRFDTILIKIQTIIFVDIDRLI

SEQ ID NO: 7831 - DNA, 330 bp, Homo sapiens
  misc_feature (173)..(173): Wherein n may be a, c, g or t
  misc_feature (293)..(293): Wherein n may be a, c, g or t
tctagaatccacttcatttttccatttaacctacaggtatcatgtgctactaagccgtacgaccaagctatatcctatgggtagaaaagaaaagaagtggatattgaacttgccatcatatagcttagggtttggtaggggttacccaaaaagagttaaacaattaataattntaaaaattataaactgtatatgggctctgaaggagagaaggaaagtgctgagatagtgcataatgttggcaggatctagtgtaggtggcagagtcaagaaagggttcttggtatatgtgnaatttgagacccctacacttgagatggagctagccat

SEQ ID NO: 7832 - protein, 62 aa, Homo sapiens
  misc_feature (13)..(13): Wherein Xaa may be any naturally occuring amino acid
  misc_feature (53)..(53): Wherein Xaa may be any naturally occuring amino acid
MASSISSVGVSNXTYTKNPFLTLPPTLDPANIMHYLSTFLLSFRAHIQFIIFXIINCLTLFG

SEQ ID NO: 7833 - DNA, 964 bp, Homo sapiens
  misc_feature (652)..(652): Wherein n may be a, c, g or t
agatctgctgccaagggcagatgtatgcgcactgcagctgggccctcctccccaggggccccatgggcacaagcagctcagggtgggccagcgagcctcagtcacactggctgccctcagccccaccttctgcatgaagggtggctaagctccatgggccactctgcattaaccccaggaacggcaacctcactaacttcatccaggtcccttcattaggacttgcaaaaacaaatcagatgcagctacacgttggggcagtgggtgcagcttctctaaacaaggccatgggtatcaagcaaccgacagtccctaaatacgctgcctctgttcccatcccacatggattctgggaaaaatggcaggaagaaagaagagaggactgggcgcttgtttgtgaccaaggcaaagaaacaaaaagcgacttctgttcaataatgagatgaaacagaagcccggcttcgggcagaggcctggcattcctgcacaacattttcccacccacctgatccccttgaacggaaggaagacctaagggaggacagagagccagtgtttgtttcctgcaatgggggtgagaggaggaaaatgaaactaaacaaaacaggagaagaggctgggtgggagaataaagtgctacgcacatacacanacacacacgcacacgtgcacgtgtgcacacatatacctagcgttaccaaagaagaggataaacaggcacatgcttcatcctagagcagatggttggctacctatgtgagacctaaagttgtcataaaaatgcacatctttgtaatctttaccaataactgtgcccactctaaccactttaatgttatccatgcaaacagacagaggcatttaaaaaatatggtatttaatgatttaatgtcagtatcatacaagaatctatggatatttcttaaatgctcccaaataccaaacttgcaaacaaaataaattg

SEQ ID NO: 7834 - protein, 136 aa, Homo sapiens [sequence omitted]

SEQ ID NO: 7835 - DNA, 386 bp, Homo sapiens
  misc_feature (381)..(381): Wherein n may be a, c, g or t
aaatttgctatgaacattaagactttgtgtcatccagaatataaaagaatctccgttgaatcgttattgaatccggtagaggagacaatagactgcgaaaaacctcactctcaaacaaaaatcaatactgctaaacccattagtgcatctttgtatgtcacaacgaataatactgctgttgttcagcacaatgtccaaaagaggaaaggcgtcaccaggagatgtccacagtgtgcggtgataaaaacttctccgcaatggagagagggtcctgatggagaggtgacattgtgtaatgcctgtggattattttatagaaaaatatttttggtttttggcaaggatctggcaaaacggtactttaacgaaataaaaagtgcnccccc

SEQ ID NO: 7836 - protein, 125 aa, Homo sapiens
MNIKTLCHPEYKRISVESLLNPVEETIDCEKPHSQTKINTAKPISASLYVTTNNTAVVQHNVQKRKGVTRRCPQCAVIKTSPQWREGPDGEVTLCNACGLFYRKIFLVFGKDLAKRYFNEIKSAP

SEQ ID NO: 7837 - DNA, 427 bp, Homo sapiens
  misc_feature (30)..(30): Wherein n may be a, c, g or t
  misc_feature (32)..(32): Wherein n may be a, c, g or t
  misc_feature (45)..(45): Wherein n may be a, c, g or t
  misc_feature (71)..(71): Wherein n may be a, c, g or t
  misc_feature (206)..(206): Wherein n may be a, c, g or t
  misc_feature (254)..(254): Wherein n may be a, c, g or t
  misc_feature (262)..(262): Wherein n may be a, c, g or t
  misc_feature (286)..(286): Wherein n may be a, c, g or t
  misc_feature (296)..(296): Wherein n may be a, c, g or t
  misc_feature (326)..(326): Wherein n may be a, c, g or t
  misc_feature (342)..(342): Wherein n may be a, c, g or t
  misc_feature (355)..(355): Wherein n may be a, c, g or t
  misc_feature (358)..(358): Wherein n may be a, c, g or t
  misc_feature (397)..(397): Wherein n may be a, c, g or t
  misc_feature (419)..(419): Wherein n may be a, c, g or t
  misc_feature (424)..(424): Wherein n may be a, c, g or t
gctagcaataaatgatatttataccatctntnagcatgtgagaantacttggataagttggcaaaactgtntcagtagtagagtggattgtgtacttaaataacagtttgcttgccagagagacaagcctttttcaaaccatatgcgaagtgactgattgcagccatctcctgaaaaacaacacgtgaaatgtaataatgcactgngtccctcccttctgcattatcaagactgaccagtgtgtaccaggcctncaattatntcaacatggtcccctttgccacanactgaagtgngaaatggcacacgctgagagggtttttgtntgctgcttttacaacnaatatatttcatntangtacacgtctgggtcatgatgtggtatatttcatcccantggtctgaatgagaggtacttnactancct

SEQ ID NO: 7838 - protein, 59 aa, Homo sapiens
  misc_feature (3)..(3): Wherein Xaa may be any naturally occuring amino acid
  misc_feature (22)..(22): Wherein Xaa may be any naturally occuring amino acid
  misc_feature (30)..(30): Wherein Xaa may be any naturally occuring amino acid
  misc_feature (33)..(33): Wherein Xaa may be any naturally occuring amino acid
  misc_feature (49)..(49): Wherein Xaa may be any naturally occuring amino acid
  misc_feature (53)..(53): Wherein Xaa may be any naturally occuring amino acid
  misc_feature (54)..(54): Wherein Xaa may be any naturally occuring amino acid
MHXVPPFCIIKTDQCVPGLQLXQHGPLCHXLKXEMAHAERVFVCCFYNXYISXXYTSGS

SEQ ID NO: 7839 - DNA, 294 bp, Homo sapiens
  misc_feature (1)..(1): Wherein n may be a, c, g or t
  misc_feature (238)..(238): Wherein n may be a, c, g or t
  misc_feature (253)..(253): Wherein n may be a, c, g or t
ntgtacatcattccgatccagctggaaacaaaagcaagaataatgttgtggaagcgtacttgcacaaggctaataaagcctattgcacaacctagaggaaggctggtgagaagatcatgctacagatacgcctcaacaggcacaggcagcagcgacagcagcagccagtggttaaaatactctgtcatcgcctcttcagccactctattcggttatttgttcgctaagaacctctatnttagggagactaagnaggacttgatagagaaactggaaatggtcaaaaagatcgat

SEQ ID NO: 7840 - protein, 84 aa, Homo sapiens
  misc_feature (66)..(66): Wherein Xaa may be any naturally occuring amino acid
  misc_feature (71)..(71): Wherein Xaa may be any naturally occuring amino acid
MLWKRTCTRLIKPIAQPRGRLVRRSCYRYASTGTGSSDSSSQWLKYSVIASSATLFGYLFAKNLYXRETKXDLIEKLEMVKKID

SEQ ID NO: 7841 - DNA, 437 bp, Homo sapiens
agatctgtttttttcagtttgtggttagcagttgaaatcaagatggtggataaagtgactctagccacctagagtgtgtagagtgagaaaagcaattgtctgagaatgaaatctggggaaataaccagctttaaagaaattaatggaaaaagaggagacattcagaaaaaaaaacacagaaggaagatcaagagccaaaaaaggaaaaccagggggatatgcggtcccagacatcaactcggtaaagtgtgtcaaggggagtggtcatcaacagggatcaacacagcagagaggtccagaaagcctgttgccactggagacctcagcaagagcaatttcactagaaggctgcaatgagaagagaggtagatgctgcagatgtggacttgtgaggctgatactgagcctagccctcaccctgaaatgcgtcttcatga

SEQ ID NO: 7842 - protein, 98 aa, Homo sapiens
MEKEETFRKKNTEGRSRAKKGKPGGYAVPDINSVKCVKGSGHQQGSTQQRGPESLLPLETSARAISLEGCNEKRGRCCRCGLVRLILSLALTLKCVFM

SEQ ID NO: 7843 - DNA, 482 bp, Homo sapiens
tcatgatttgcaataaaagaaacattccaataatccaagacatgcccagcctttgaggacttagatcctaaactaccttgtcttccccaatcctgtacactacaccacactctcagtctcctcctctgcttaactaagctccatctccactgacatctctgcctagtctcttaatccaatgcatagcctgcttatctcccagtcagttcctagtttaccagcttcctctcctcattcccagactcaagaattctacagatggctgctactcaattccatccttagaaccatacttcttgtactttgtctaaacagcaacccaacaactcactcaacccatgcaggtcttaaaggcagaccccagaaagcagatcttttactgatatttattgattagggttgaaatgtcatcttgaaatagaaaggatactttttaataaaagaaaactacccctattgcagaagacattagtgagtccgga

SEQ ID NO: 7844 - protein, 72 aa, Homo sapiens
MHSLLISQSVPSLPASSPHSQTQEFYRWLLLNSILRTILLVLCLNSNPTTHSTHAGLKGRPQKADLLLIFID

SEQ ID NO: 7845 - DNA, 561 bp, Homo sapiens
  misc_feature (352)..(352): Wherein n may be a, c, g or t
  misc_feature (353)..(353): Wherein n may be a, c, g or t
  misc_feature (370)..(370): Wherein n may be a, c, g or t
atgagccggatcctgctcgtcgaagacgagcctcacatcatcaggtctctggcccccgccctggtcgccgagggctatcaggtcaccgccgccgagaggggtgacgatgcgcttgcggccctggccagtgaggggtttgacgtcatcctgctcgatctcgggctgccggatatggatggcaaggacgtcatcgcccgcgtccgggaatggtccgaagtccccatccttgtcttgagcgcaaggcatctggaggccgagaagatcgcttctctggacctgggtgcggacgactacgtcaacaagcccttcgcgatgggtgaactgatggcgcggctccgggccgtgctgcggnnggacgagatcgtcggtntttcgtcccagtcgctattcagggtcggcatgcttgatatcgacttttccgcccggtcggtccggttggaaggcgagacggtcagtctaacgcctcgagagtacgacctgatgcgcaccttggcgcgccacgcgggacgtgtggtcacgcatgctcagctcgtcaccgccgtctggggcggcgccgacgtt

SEQ ID NO: 7846 - protein, 187 aa, Homo sapiens
  misc_feature (118)..(118): Wherein Xaa may be any naturally occuring amino acid
  misc_feature (124)..(124): Wherein Xaa may be any naturally occuring amino acid
MSRILLVEDEPHIIRSLAPALVAEGYQVTAAERGDDALAALASEGFDVILLDLGLPDMDGKDVIARVREWSEVPILVLSARHLEAEKIASLDLGADDYVNKPFAMGELMARLRAVLRXDEIVGXSSQSLFRVGMLDIDFSARSVRLEGETVSLTPREYDLMRTLARHAGRVVTHAQLVTAVWGGADV

SEQ ID NO: 7847 - DNA, 229 bp, Homo sapiens
gtcctccgcaaagagccgcgacgcgcctcgcagcagtaccggagcaaggttcagatggtcttccaggacccgttcggctcgctcaacccgatccatcaggtacggcacttcctcgaacgggccatccggctgcacaccaaggtcggtcgaggcgagaacctcgagagcaggctcgaggagctcatggcgacggtggacctgccggccgagcttctcgacacccacgcgt

SEQ ID NO: 7848 - protein, 76 aa, Homo sapiens
VLRKEPRRASQQYRSKVQMVFQDPFGSLNPIHQVRHFLERAIRLHTKVGRGENLESRLEELMATVDLPAELLDTHA

SEQ ID NO: 7849 - DNA, 296 bp, Homo sapiens
  misc_feature (1)..(1): Wherein n may be a, c, g or t
  misc_feature (2)..(2): Wherein n may be a, c, g or t
  misc_feature (82)..(82): Wherein n may be a, c, g or t
nnccgtgcatgtgtatgtgatgtgtatgtggtgtgcatctgtgtctgcatgtgtctgtgtagcatgtctgtatgtgtatgtnggtgtgcgtgtgcgtgtgtgcgtctgtgtgcgtgcatgtgtacgtggatacgcgtctgtgcatgtgtgtgcatgtgcgtatatatgtgcaagtgcgtgtatgtgtgtctgcgtgtgtgtggatgtgtagtgacgtgcatgtgtctgtgcgtgtacgtgtctgtgtgcacgtgcgtgtatgtgtgcgtctgcgtgcatgtgtgcgtgcggtgcac

SEQ ID NO: 7850 - protein, 98 aa, Homo sapiens
  misc_feature (1)..(1): Wherein Xaa may be any naturally occuring amino acid
  misc_feature (28)..(28): Wherein Xaa may be any naturally occuring amino acid
XRACVCDVYVVCICVCMCLCSMSVCVCXCACACVRLCACMCTWIRVCACVCMCVYMCKCVYVCLRVCGCVVTCMCLCVYVSVCTCVYVCVCVHVCVRC

SEQ ID NO: 7851 - DNA, 304 bp, Homo sapiens
cttcaatgccgctccatacgcggatgatgttgaggttgccgacaccgggcagcagccggcgcatctggttgacctggttgagaatactgcgcggctcgacctgagcacgacgattgagcatgtccggcttgctgcggtaaccgccgccgataacgatattgccacggggaatctggcggaagtaaatcacttcctcagggatcttggtgtacacgccgatcacggtcggcaacgcatacggcaccggctcggtaacggccatttgcgggccatgggtatccagcggcaccgggctgcatggatt

SEQ ID NO: 7852 - protein, 87 aa, Homo sapiens
MAVTEPVPYALPTVIGVYTKIPEEVIYFRQIPRGNIVIGGGYRSKPDMLNRRAQVEPRSILNQVNQMRRLLPGVGNLNIIRVWSGIE

SEQ ID NO: 7853 - DNA, 411 bp, Homo sapiens
  misc_feature (179)..(179): Wherein n may be a, c, g or t
  misc_feature (404)..(404): Wherein n may be a, c, g or t
  misc_feature (405)..(405): Wherein n may be a, c, g or t
  misc_feature (410)..(410): Wherein n may be a, c, g or t
  misc_feature (411)..(411): Wherein n may be a, c, g or t
ggatccatcacccatttttttcttctgatttttcccttttggaaggaaatatgtctcctatgcctctcccaccatagcattttggaagcacatagtgtggctggtttcacaggctcatagctggagaataattttgcctcaggacaagtcatatcttgagtctcacccgtacttcattnggataatatttatgagactttgaactttagactttagagttgacatgggaatgagttaagattttgggtattgttggtatagaatgaatgtactttgcatgcaagaagaacatgaattctacctggggtagaatgcttgtggattgaaatgtgtccttgaaaatgcgtatgttgaagctataacccccaatgtggtatttggagacaggaccttagggagagagnnaggtnn

SEQ ID NO: 7854 - protein, 50 aa, Homo sapiens
MTCPEAKLFSSYEPVKPATLCASKMLWWERHRRHISFQKGKIRRKKWVMD

SEQ ID NO: 7855 - DNA, 330 bp, Homo sapiens
cggaaaagaaatactgaaagtgtcgaagatagaggtaggtccaacgatgctcatacaagcagaaatatgaaaaacaaaattaaaaggcgtgctttgacttcaccagaaagatgggaaattcgccaactaattgccagcggtgctgcttccatcgatgactatcctgaattgaaggatgaaatacccataaatacttcctatttgaccgcgaaaagagatggcggcagtatcgttaacggtaatacagagaaagtggactcaaaattggaagaacaacaacgagacgagacggatgaaattgatgtcgagctgaatacagatgatgggccc

SEQ ID NO: 7856 - protein, 110 aa, Homo sapiens
RKRNTESVEDRGRSNDAHTSRNMKNKIKRRALTSPERWEIRQLIASGAASIDDYPELKDEIPINTSYLTAKRDGGSIVNGNTEKVDSKLEEQQRDETDEIDVELNTDDGP

SEQ ID NO: 7857 - DNA, 315 bp, Homo sapiens
gaattcctgctcccaataaagcttatctagtggtagaaaaaaacaattaacacccccttttccccctacacagacacgtgcgtgggcacacacacatacacacacacacatttttacagattgtgataaacatgaagaaaataatgtcatgtggtagatggtgaagagattagtcagtgaagagctttatgaggaagtgtcatttgaattggaatctgagggatgagaggaagctaggcagagtgtgcttggccatcaggtagcaaatacttaaaatatttaacttgaacgtgggtcagagtgtggaggggatcc

SEQ ID NO: 7858 - protein, 50 aa, Homo sapiens
MTLFSSCLSQSVKMCVCVCVCAHARVCVGGKGGVNCFFLPLDKLYWEQEF

SEQ ID NO: 7859 - DNA, 558 bp, Homo sapiens
ccggaaattgaagagaaaattaggaatccttctaacgaaatagaacaaatatttctatatttgctcttgaatgatgtcgtaagggcatccaagttagcaattgagtctaagaatggtcatttgagcgttttgatatcctatttgggttcaaacgacccaaggatacgtgatttagcggaattacaattgcaaaagtggtcaactggtggttgtagtatcgacaagaatatctcgaagatttacaaattactaagcggttcaccttttgaaggtttattttctcttaaggaacttgaaagtgaattcagttggttgtgccttttgaatttgacactgtgctacggccagatagatgagtattccttagaatctcttgtgcaatcgcatttagacaagttttctttaccctatgatgatcctattggagttattttccaactatatgctgctaatgaaaatacggagaagctctataaggaggttagacaaagaaccaacgctttagatgttcagttttgctggtacttgattcaaacattgagatttaatggaacacgc

SEQ ID NO: 7860 - protein, 186 aa, Homo sapiens
PEIEEKIRNPSNEIEQIFLYLLLNDVVRASKLAIESKNGHLSVLISYLGSNDPRIRDLAELQLQKWSTGGCSIDKNISKIYKLLSGSPFEGLFSLKELESEFSWLCLLNLTLCYGQIDEYSLESLVQSHLDKFSLPYDDPIGVIFQLYAANENTEKLYKEVRQRTNALDVQFCWYLIQTLRFNGTR

SEQ ID NO: 7861 - DNA, 293 bp, Homo sapiens
tgggcaatgtgcccgccagccaacgccgatgcgcctttcaggtttgtgaaacgcgctgcatctattacacttttcgggtgaattgaggcttgttatcacaagatcgccatgaacaagccctagcccgtaattcgactacaagaacggaattccagcttatgacccagcgttcgcgccaagtgaagcatgcccgccgtttgaaggccctccagtgggcgatcgcattggcgctgggcgcgagcatcagcagccaggcgctggcgatgcgggtggggcattcacgcggtcggaga

SEQ ID NO: 7862 - protein, 59 aa, Homo sapiens
MLAPSANAIAHWRAFKRRACFTWRERWVISWNSVLVVELRARACSWRSCDNKPQFTRKV

SEQ ID NO: 7863 - DNA, 193 bp, Homo sapiens
tcatgaccaggagtggacatttctgaatccaggtggttgcaagggcaatagggtgacctgtttttagtgctggctgtgccttttgttggatctgtacctttggaaaaggcacttacccctctaagccttaagttgctcatctgtaaaatggagggtaaaatcatccttactttcagcctggcacaggggctca

SEQ ID NO: 7864 - protein, 54 aa, Homo sapiens [sequence omitted]

SEQ ID NO: 7865 - DNA, 219 bp, Homo sapiens
atgaccaaaggtcgccttgaagtaggcgtacatgatctgcggcagtgggcaactgatgcgcataagtctgtcgatgattcgccggtcggcggcggccctggcatggttatgaagccggaagtatgggggccggcactcgatagtgttgctgctcaggaaagtgcaccgaacctagaatcggcccttccgcacttgaaccgtccccgccacgatgagctc

SEQ ID NO: 7866 - protein, 73 aa, Homo sapiens
MTKGRLEVGVHDLRQWATDAHKSVDDSPVGGGPGMVMKPEVWGPALDSVAAQESAPNLESALPHLNRPRHDEL

SEQ ID NO: 7867 - DNA, 534 bp, Homo sapiens
  misc_feature (175)..(175): Wherein n may be a, c, g or t
cacgccgatttcccggccatcgccgccctgcaacggcaagaccaggtctacctggacagcgccgccaccacccagaagccccaggcgctgatcgatgccctggcacactattacagcaacggtgcggccaatgtgcaccgtgcccaacacctgcccggcgccacgcccacccagnccttcgaggacagtcgaagcaagactggccagtggctcaacgtcggcaatagcggacagatcgtcttcacccacggtgccacctcggcgctgaacctcctggcctatggcctggaagcgcttttccagcccggcgacgagatcgttatcagcgccctggagcatcacgccaacctgctgccctggcagcaactggcgcaacgtcggggactgcgcctcgtggtgctgccgatcaccgacagtggcctgatcgacctggaagccgcccgcccgttgatcggcccacggacccgcctgctggcggtcagccaactgtccaacgtgctcggggcctggcaaccgttaccgcaattgctggcc

SEQ ID NO: 7868 - protein, 178 aa, Homo sapiens
  misc_feature (59)..(59): Wherein Xaa may be any naturally occuring amino acid
HADFPAIAALQRQDQVYLDSAATTQKPQALIDALAHYYSNGAANVHRAQHLPGATPTQXFEDSRSKTGQWLNVGNSGQIVFTHGATSALNLLAYGLEALFQPGDEIVISALEHHANLLPWQQLAQRRGLRLVVLPITDSGLIDLEAARPLIGPRTRLLAVSQLSNVLGAWQPLPQLLA

SEQ ID NO: 7869 - DNA, 414 bp, Homo sapiens
  misc_feature (369)..(369): Wherein n may be a, c, g or t
  misc_feature (393)..(393): Wherein n may be a, c, g or t
  misc_feature (394)..(394): Wherein n may be a, c, g or t
tccggacccttcaggggagaatctttctgcctctttggcttcttgaggccccttcctggcattgcttctttctccactgactcctaccatcagcgctgagtcctgcctgcctcttataaggtacttctttctccactgactcttaccatcagcgctgagtcctgcctgcctcttataaggcgcttctgggatgactcctggtgcacccaataatccacgctcatctctccagatccaggttcataacccaatcacccccacaaagggaggtcacgtgttccccagctccacggatcatgaggagggcatctttgggggtgatactatgcagctgaccacagcctctctccacctgggctcccacacccnacctattctgcagatcttcagagnngcagctggatgtcagaagct

SEQ ID NO: 7870 - protein, 74 aa, Homo sapiens
  misc_feature (60)..(60): Wherein Xaa may be any naturally occuring amino acid
  misc_feature (68)..(68): Wherein Xaa may be any naturally occuring amino acid
MTPGAPNNPRSSLQIQVHNPITPTKGGHVFPSSTDHEEGIFGGDTMQLTTASLHLGSHTXPILQIFRXAAGCQK

SEQ ID NO: 7871 - DNA, 396 bp, Homo sapiens
  misc_feature (360)..(360): Wherein n may be a, c, g or t
agatctaaaagtgaccttagtcgcaaaagataaatcgacggtcgagatgacggtcggggagttacttccatactcttttacagacttaaactagtctgagtcgctctctgagtggcacggtccttgtggccaaccaatccatacttgcaacatcgttacacatcttatttaggaggttcagtaatgaacaagaaacaatggctaggccttggtctagttgcagtggcagcagttggacttgctgcatgtggtaaccgctcttctcgtaacgcagcttcatcttctgatgtgaagacaaaagcagcaatcgtcactgatactggtggtgttgatgacaaatcattcaaccaatcagcttgngaaggtttgcaagactggggtaaagaaacacatctt

SEQ ID NO: 7872 - protein, 63 aa, Homo sapiens
  misc_feature (51)..(51): Wherein Xaa may be any naturally occuring amino acid
LGLVAVAAVGLAACGNRSSRNAASSSDVKTKAAIVTDTGGVDDKSFNQSAXEGLQDWGKETHL

SEQ ID NO: 7873 - DNA, 340 bp, Homo sapiens
gtgcacagaggacagaaggagcaggattcctcaggacagggcctccgttctaaacattgagaggcatgaaggatgaggagggaatcacagatcgcattctgacagactcaatcaagaacaccctactatgtacagacagggatcgcaacagaccactacttcagcctaataaaaaccatggggtccgagggagaaaaaaaccacactcagccctttcacctagagataacaactaggcccctgtagtgccttcactcatttttatggattaaaaaaaaaaaaaaggtggggggaaaagggcgccctggggggggagaggggccaggggtaacaggcattt

SEQ ID NO: 7874 - protein, 56 aa, Homo sapiens
MKDEEGITDRILTDSIKNTLLCTDRDRNRPLLQPNKNHGVRGRKKPHSALSPRDNN

SEQ ID NO: 7875 - DNA, 382 bp, Homo sapiens
aaggcagacacttaaaggcattcatatatgcattaattatattattatgtgtggcagggcaaagccatgaaaagagagaaagacttttaatcactctgtgctccaggacggagctataccatgtgtattcacatctggcccctaaattaccagtgaaatacacagtgcaagtaactgtgacatacaagaggactagaacgctgtcttgcattacatgtcatcaattttgagtcaggttgggatgatctatatccctagagagaaaaagttactctagaaaataactttttgaagccctagaagaggggcaagaaattctttcttctaatagttttctttccatttcttaaaaagaaaaagttggatgctggggtgattgcaa

SEQ ID NO: 7876 - protein, 70 aa, Homo sapiens [sequence omitted]

SEQ ID NO: 7877 - DNA, 250 bp, Homo sapiens
  misc_feature (124)..(124): Wherein n may be a, c, g or t
  misc_feature (245)..(245): Wherein n may be a, c, g or t
  misc_feature (250)..(250): Wherein n may be a, c, g or t
aaattttggaaagtcatggccccgatggagactttggttaggagactcctcccaagggaggagctctaggtgggcaactgcagaagagcatgggacagaagttacacagatggagacccacggngctgggggaggccaggggtaggacccacctgggaatgagtaagcaaagagctgcagccaccaccagacaggcacggggacaactgggcacagaaggaaagcggagaggcagggaaggccgnagaan

SEQ ID NO: 7878 - protein, 53 aa, Homo sapiens
  misc_feature (12)..(12): Wherein Xaa may be any naturally occuring amino acid
MGQKLHRWRPTXLGEARGRTHLGMSKQRAAATTRQARGQLGTEGKRRGREGRR

SEQ ID NO: 7879 - DNA, 344 bp, Homo sapiens
tccggagaacggacccgaaagatgtggatggtcccgttactgagggacacgaccaggtacctgccatccaccatggtggtaacccggggcttttccaggccgtggtaggctgtcaggaagtctccaaggagggaccccttcgggtccaggatcaccaccttgttgacttctcgaagggtcagaaagatgtagcccttcttatccacagacacggagcccggctgggcagccatgcaggcctggccccttgtactccccaacccactgggcccagcccatccagattaccacactattctgctggcagtccgacccccccaaatgccccttgggggttgttgttc

SEQ ID NO: 7880 - protein, 77 aa, Homo sapiens
MAAQPGSVSVDKKGYIFLTLREVNKVVILDPKGSLLGDFLTAYHGLEKPRVTTMVDGRYLVVSLSNGTIHIFRVRSP

SEQ ID NO: 7881 - DNA, 224 bp, Homo sapiens
gtacaggatgctgatggggctacagcactcatgtgtgccagcgagtatggacgccttgatacagttcagttgttgttggcccagccaggttgtgacctaaccatcttagacaatgagggcacaagtgccttggccattgcactggaggctgaacaggatgaggtggctgcattgctccatgcccacctgacatcaaaccaccatgactcccaggaacagtcgac

SEQ ID NO: 7882 - protein, 74 aa, Homo sapiens
VQDADGATALMCASEYGRLDTVQLLLAQPGCDLTILDNEGTSALAIALEAEQDEVAALLHAHLTSNHHDSQEQS

SEQ ID NO: 7883 - DNA, 292 bp, Homo sapiens
gaattcaaaggtgaggcctggctctccagagcctcctctaagggcagagacactgtaggtgcctgcctcatgggccatgtggcattccgatcccaggccttggtctggacatcattacccagcccttgtgtgtccctgacctcacaagcactgttgagagctcagcttcctgtatctgtgccattagggaagagaacttcatcttgctctgtgtggtcccctttgccgagcaggtgctgtgggtgtaagccgttactggatctttcctgctagtgttgtactcgttgtgcac

SEQ ID NO: 7884 - protein, 67 aa, Homo sapiens
MGHVAFRSQALVWTSLPSPCVSLTSQALLRAQLPVSVPLGKRTSSCSVWSPLPSRCCGCKPLLDLSC

SEQ ID NO: 7885 - DNA, 566 bp, Homo sapiens
  misc_feature (548)..(548): Wherein n may be a, c, g or t
gtgcactccggagcgactgcccccaccccgaccttgtctccaccgctccctcctgcctttcccgaagaatgggctcctccggcgcctcaacgcacagaaaacgcctgcctccagctgagcgcttttgccagctttctccaaccagtgaataagggatgcactatggactcagaaggaaatgtcatatttaagttctgcctctgatttctctgctcttagctgatctaaggtttttctagactccttagtttccactcacagtgctgggtaatggagccctaccgcactgattgagaattgccggccagtgggttggtacagagcaaattgtccttgctaacaacctttttcctttgctgttggattccactaagtggtgagaggggtcagttttagattttgcaattccccagcgtggagacaggccggctctatacgagaataagtgataggcagaggaagaatttggcagtgttcccgggttgattttattttggtctcttgaacacattattcttcctgatagaacaaatccctggacttggtangacccagttccagggaag

SEQ ID NO: 7886 - protein, 88 aa, Homo sapiens
MCSRDQNKINPGTLPNSSSAYHLFSYRAGLSPRWGIAKSKTDPSHHLVESNSKGKRLLARTICSVPTHWPAILNQCGRAPLPSTVSGN

SEQ ID NO: 7887 - DNA, 232 bp, Homo sapiens
  misc_feature (232)..(232): Wherein n may be a, c, g or t
tcatgagcggactcctcgggcagtacatggtcaatgctcaggcgttggcgggtgaagtaggtgcgcgcgcgtcctggatgtcctgcggggtgacgcgcttgagctcgtccagctcgctgtcgatcagtttccaggacaggccgacggtttccagctggccgatggtggtggcctggctgctgatggagtcgcggtcgtagaccaggccggcaatgacctgggcgcgtacgcn

SEQ ID NO: 7888 - protein, 65 aa, Homo sapiens
MSGLLGQYMVNAQALAGEVGARASWMSCGVTRLSSSSSLSISFQDRPTVSSWPMVVAWLLMESRS

SEQ ID NO: 7889 - DNA, 597 bp, Homo sapiens
  misc_feature (448)..(448): Wherein n may be a, c, g or t
tgatcaagtaatctattactgtcaatgcctttgcgatatgcctccagtatttgcccttgtcgttaagtcttttgtccagcatatccatgatttcgaagaaatctgcgttatcatatgattttttcagcccgctccatttaaccaagtccttggaccactggttgattgtcgtgtgacgttgcatttcttaccaggacctgggtagaagagtaccctttcaccaaattcttcgcagatctaacaaattgtttcgacatgattgttctgcctcttgctccctttccttctgatcctggcactcatacgaacggctctttcttctacttcttaaaactcctatttgtcattgaaagaaactttcatcattacccggatgattctctatacgtagccacaatttcagacaaccatacttccaaaatcaagtactttgaacaacataaggccncaccaaccttccgtaagacttgcaataggaattcgtactgcagccgctggttctattgctgtttaactctgtcatctttttgctcgcttcgatgtgttcctccacttgagatggctgatggaatttttcaccttaacgcgaaaacgcgt

SEQ ID NO: 7890 - protein, 114 aa, Homo sapiens
  misc_feature (65)..(65): Wherein Xaa may be any naturally occuring amino acid
MIVLPLAPFPSDPGTHTNGSFFYFLKLLFVIERNFHHYPDDSLYVATISDNHTSKIKYFEQHKAXPTFRKTCNRNSYCSRWFYCCLTLSSFCSLRCVPPLEMADGIFHLNAKTR

SEQ ID NO: 7891 - DNA, 434 bp, Homo sapiens
tggcagcacattccccccaaacgtgccagactggtggccatgtcgacgaatcccgagactccccaatggttcgccctcacacctcgggtgtggacaacctctgttgaaccagggagtgtcacttgcggactggtagctggcgaggaccacgtcctcctcatcgataccggatcgactcccgagcaggggcataccttggcgatgtcagcagcccgtatgctgggccgccccgtcgatcgaatcgtcgtcacccatcaccactacgaccacagcggtggcctacccggcatcaccgatgctgaagtgtggatgcacgaggctgcgctagctcactgtcccgacctccatgtcgaccaccccgtatctcttatggcgtatgtgaacttgggaggattgggtgccgaggttatccatcccggcccggctcacaccga

SEQ ID NO: 7892 - protein, 144 aa, Homo sapiens
WQHIPPKRARLVAMSTNPETPQWFALTPRVWTTSVEPGSVTCGLVAGEDHVLLIDTGSTPEQGHTLAMSAARMLGRPVDRIVVTHHHYDHSGGLPGITDAEVWMHEAALAHCPDLHVDHPVSLMAYVNLGGLGAEVIHPGPAHT

SEQ ID NO: 7893 - DNA, 428 bp, Homo sapiens
gctagctactgagaggtgggaagaggaaaattctaggcatctggtcatgtttagaaagaggtttgcctcctcgaacaacatggcagggcctgtacaaactactgaccttcttccttccacatcaccctttccttatctcccagtctggtgacttgtcttctcttttagtgatacctaattggtactctgtcagaatgggggccctgtcctctggtgggtgctggcttgaggtctcctggcctgaaggtgggtgggaagaccaactgaaagaagtcctagttttcttagctatatggggagaagggagtatcagggcctgccagccctggagggaaagccctgtggggcatgactccaggtaggtgtgaacaccatctgcctccctcatcctctttctctgaacagacagacagggatggggctgactg

SEQ ID NO: 7894 - protein, 88 aa, Homo sapiens
MREADGVHTYLESCPTGLSLQGWQALILPSPHIAKKTRTSFSWSSHPPSGQETSSQHPPEDRAPILTEYQLGITKREDKSPDWEIRKG

SEQ ID NO: 7895 - DNA, 399 bp, Homo sapiens
  misc_feature (1)..(1): Wherein n may be a, c, g or t
  misc_feature (289)..(289): Wherein n may be a, c, g or t
ngccgatcggggtggagagcacacgctttccgcccggttgttatgcaagacgatagccggagggcgtttcgcatggtgcgggcgtcagcgatcggccaagatagagagacgagacacatggctctatacgagcacgtgttccttgcgcgccaggatctggcacaggcgcaagtggacgctctggcggaaatcgccaccaagatcgtgaacgagaatgaaggccgggtcgtcaagaccgagaattggggcctgcgcagcctcgcctacaagatcgccaagaaccgcaagncgcattacgtcatgctcgaaatcgatgccccgggcagcgtgatcgtcgagctggagcgtcaggttcagatcaacgaagacattattcgctacatgaccgtcaagatcgat

SEQ ID NO: 7896 - protein, 94 aa, Homo sapiens
  misc_feature (58)..(58): Wherein Xaa may be any naturally occuring amino acid
MALYEHVFLARQDLAQAQVDALAEIATKIVNENEGRVVKTENWGLRSLAYKIAKNRKXHYVMLEIDAPGSVIVELERQVQINEDIIRYMTVKID

SEQ ID NO: 7897 - DNA, 304 bp, Homo sapiens
ggatccagcagcaccatccaccttgctggcccgtctagtgctctcatctacgctctcattgggtttttcctctacttcatgataatgtccataaagagttccaaagattatttcctattttgtttttcctcctgtgcatacaaatcatagtgggacaggataaagtggcaactaacaaacaccaacaggactaacaaactcaaatccccttcccttacacactgtactgctaagagagtactgaatccctcaaacgagatgattccttccatgtgtttctttttgcctgctcattcccaaattt

SEQ ID NO: 7898 - protein, 54 aa, Homo sapiens [sequence omitted]

SEQ ID NO: 7899 - DNA, 373 bp, Homo sapiens
gccggctactccagcctggggtatttgcggcgcctgccgatcagcgagttgaaactggacaagagcttcgtcgacgacctggagcgcgatgcttcctgccgcgccctgagtgagtctgtcattggtatcggcaaggggcttggcttgcacgtggtggctaaaggcattgaacaggtcgcccagtgcgatatcctcgtggcgcagggctatgaggtagggcaaggctattagttatcgataccaattccgaatgaggcgtttacaaaatggctcatgccgcgtcacaccgagccttgagtggacgagggggtcatggtgatgacggccatcacggacaacctccagccggccatgagtgggtccgcaacgtttc

SEQ ID NO: 7900 - protein, 76 aa, Homo sapiens
AGYSSLGYLRRLPISELKLDKSFVDDLERDASCRALSESVIGIGKGLGLHVVAKGIEQVAQCDILVAQGYEVGQGY

SEQ ID NO: 7901 - DNA, 258 bp, Homo sapiens
gcgttcaagtgcaagaacgaattaaataatattcctatttctaacgacaatagtaacgtaaccgatgatgaaaacgtaatctccctattgaattatgttctggattttttaattgatgtaactgtttcatacaaagaggaggcagaagcccattcaagcgagagaaaagcatcctccctaatgcatcctaatcaaaacagcattactgatgatataatggaaaaacacgaatgtgaaccattggtcaatgatgaaaat

SEQ ID NO: 7902 - protein, 86 aa, Homo sapiens
AFKCKNELNNIPISNDNSNVTDDENVISLLNYVLDFLIDVTVSYKEEAEAHSSERKASSLMHPNQNSITDDIMEKHECEPLVNDEN

SEQ ID NO: 7903 - DNA, 263 bp, Homo sapiens
ccggtaggagcgtatgcagctgtacatcgtcggaaaagtcgcggctttgtggcctcagcactgtcccaggttttgatgagcattcctgccttcttagctggcatcctactcatcttgctgttctccgtgactctcggttggttaccggctggcggctacgttcccctgcatgaggatgccggtgcatgggcagcccacctcatcttgcctgtgttgtctctctcgatcgttcaggcagccgtcatgtctgcatggatattcgc

SEQ ID NO: 7904 - protein, 87 aa, Homo sapiens
PVGAYAAVHRRKSRGFVASALSQVLMSIPAFLAGILLILLFSVTLGWLPAGGYVPLHEDAGAWAAHLILPVLSLSIVQAAVMSAWIF

SEQ ID NO: 7905 - DNA, 853 bp, Homo sapiens
gcgtggaacgctgactttgtgcgtaactccaatgtggaaactcgttacgaggcgctggccgcggagatcgaacgggcgttggtgttcatgatggcgtgcggagtcgagggcgatcagctctccaccgttgacttctacgctagccatgaagccctgctcatcgactacgagcacgctatgacgcggatcgactcgcgctcccagctaccctatgattgctctggccatttgctgtggattggtgagcggacccgtcagattgatggtgcccacgtggagttcctgcgccacgtgcgcaatccgctgggggtcaagcttggcccgacgacgactggggaggacgccgttgctatcgctgatgcccttgaccccgatcacgagcctggccgtctgaccttcatcacccgaatgggaagcaaggctgtgcgtactaacctgcccagagtcatcgaggcagtggaagccactggacgcaaggtggtgtggagctgcgaccccatgcacggcaacaccttcgaaacgaataacggttacaagacgcggtcgtttgctgacatgtgcgacgaggttaacgggttcttcgacgtccatgaggagttaggtacctggcctggcggtgtgcacatcgagttgaccggggacgacgtcacggagtgcttgggcggggtcgacaagctagcagagtccgatctgacaaaccgctacgagaccgcctgtgacccacgtctgaaccggaaccagtccttggaactggccttcataatcgctgagagattggctgacggccgtatcaagcgcgatgccgtcagcccgctggcaaggttccgcagcatcgacctatgatcgatccgga

SEQ ID NO: 7906 - protein, 280 aa, Homo sapiens
AWNADFVRNSNVETRYEALAAEIERALVFMMACGVEGDQLSTVDFYASHEALLIDYEHAMTRIDSRSQLPYDCSGHLLWIGERTRQIDGAHVEFLRHVRNPLGVKLGPTTTGEDAVAIADALDPDHEPGRLTFITRMGSKAVRTNLPRVIEAVEATGRKVVWSCDPMHGNTFETNNGYKTRSFADMCDEVNGFFDVHEELGTWPGGVHIELTGDDVTECLGGVDKLAESDLTNRYETACDPRLNRNQSLELAFIIAERLADGRIKRDAVSPLARFRSIDL

SEQ ID NO: 7907 - DNA, 349 bp, Homo sapiens
  misc_feature (1)..(1): Wherein n may be a, c, g or t
ntgccatcccctcacaccagaagcaaccacttgtatgatttttatcatcacaggttagtttagtctattccagaacttcacataaatagaataatccagtttttttttttttgcatgttcggcgtctttcactcagcataaggtcattgagattcatcctcatttttctatcaggggttccttcctttttgtagcccagaagtactccatggtaaaaatatacaaaaacttgcttttccattccttggagttatttttgacggatttcttttttttcacatcccaaatcttctccattagaaagttctatggctctggctccaaataaaacctgaatttgaccacatgc

SEQ ID NO: 7908 - protein, 58 aa, Homo sapiens [sequence omitted]

SEQ ID NO: 7909 - DNA, 541 bp, Homo sapiens
acgcgtgcagagcacactccagcctctgttcttttgaggatttcctgtatttccttgttcattatcaattggcttccttttggaataactaagaaatgagttaagtaaattgttacttaaattctaattttgtaatttccctttcttaggattcaagatggattcatcatttttcggtggtggaaaatgtataacccaaaacagaagcaacatgattttcccgtggcttcccatctcactcagaacaacaccaaggtcttgtaagtgacctatagaatcctacgaactttctataaatagcttataaaatcctatattaaatccctataaaaaattctataaaattccttctacctctgatcatcttaccttccaccccactccagataaactggcctgttagtgttggtgatgaaactgcagcagagccaccatgaaatgttggcctctggatattcacagtattcattcccttatttgcttggtggttctggttaactatcctctatcaatcaagcttttcctgaatacttttgtaaag

SEQ ID NO: 7910 - protein, 50 aa, Homo sapiens [sequence omitted]

SEQ ID NO: 7911 - DNA, 639 bp, Homo sapiens
  misc_feature (1)..(1): Wherein n may be a, c, g or t
ngccggcgtagacgccgccaccatcaaggctggcctccagaagagggctacctcgtgcgcaccatcggcgaggacaaggtatcggtgtcctttggtgagtcggcgaccaaggaggacgtcgccaagctcgcccaagccttcggcgccgaatctgctgaggctgacttcgccctgccggagaacctgcagcgcggcgaagagccgctccagcacgagatcttcaatcgcattcactccgagacccagatgctgcgctacctgcgcaagctagccgataaggacttggcgctcgaccgcaccatgatcccgctgggctcctgcaccatgaagctcaaccccaccgccgccatggaacccatctcctggccggagtttgcaggcatccacccctacgcaccagaggaaacgacccccggttggcgcgcattggtagaagagattgaagggtggctggccgaggtccccgggtacgccaaggtctccatccagcccaatgccggttcccagggcgagctggcgggtcttttggccatccgccgctaccacgtggccaatggcgataacgagcgcgatgtagtgctcatcccagcctccgcgcacgggaccaatgcggcttcggcaacgctggctaacctacgc

SEQ ID NO: 7912 - protein, 213 aa, Homo sapiens
  misc_feature (1)..(1): Wherein Xaa may be any naturally occuring amino acid
XRRRRRHHQGWPPEEGYLVRTIGEDKVSVSFGESATKEDVAKLAQAFGAESAEADFALPENLQRGEEPLQHEIFNRIHSETQMLRYLRKLADKDLALDRTMIPLGSCTMKLNPTAAMEPISWPEFAGIHPYAPEETTPGWRALVEEIEGWLAEVPGYAKVSIQPNAGSQGELAGLLAIRRYHVANGDNERDVVLIPASAHGTNAASATLANLR

SEQ ID NO: 7913 - DNA, 381 bp, Homo sapiens
  misc_feature (1)..(1): Wherein n may be a, c, g or t
  misc_feature (2)..(2): Wherein n may be a, c, g or t
nnaccggttgggtacacggctacggggaccccgccatcttcaattgggcagtgtggctggacgaggtcatcatcgggcagattgctgtcgtggacgttgataccagagttaaccctcgccgacctgggctactgctttggcagacgctggtggaatcatggctacgcgaccgaaacggttaaagcggtgatgtcttatttgttcgacaccgcccaggtcaacaaggttggggcccgccacgacccggcgaacatcgcctccgggagagtaatggagaaggcgggaatggtcgccgaagggttgcggcgagcatgcgtgatggattcgtgcggcccacgagactcccagtaccatggcctgctgcgcagcgaatggagaggc

SEQ ID NO: 7914 - protein, 127 aa, Homo sapiens
  misc_feature (1)..(1): Wherein Xaa may be any naturally occuring amino acid
XPVGYTATGTPPSSIGQCGWTRSSSGRLLSWTLIPELTLADLGYCFGRRWWNHGYATETVKAVMSYLFDTAQVNKVGARHDPANIASGRVMEKAGMVAEGLRRACVMDSCGPRDSQYHGLLRSEWRG

SEQ ID NO: 7915 - DNA, 344 bp, Homo sapiens
gaattcggcccaggtattgggaaccttcagacctttctcctgataaaagtccttcctgtaatataccgtcaccaggttgtagtcgtagggatagaaccagttttcgcccttgtagctccaggcgccctgcttgccccacgaatacttcttgacgagttcggtcagcggcgcgagatggccggccatcgcgtattgcaggatatgggcgatgtatccctgcgtggcgagatcgtagggaacgccggcgttgatcgcggccatcgtcttggcataggccccgctgatcggcgtcgagtcgacgacaatcttgacgccatgcttggcttcataggcgttgcacgcgt

SEQ ID NO: 7916 - protein, 87 aa, Homo sapiens
MAAINAGVPYDLATQGYIAHILQYAMAGHLAPLTELVKKYSWGKQGAWSYKGENWFYPYDYNLVTVYYRKDFYQEKGLKVPNTWAEF

SEQ ID NO: 7917 - DNA, 586 bp, Homo sapiens
gctagcaggtaatggaaactgccgattctcgtttccttcctctccttcccacacccggtgccccaacccagttaccctttgatggagatgttagtgagcagtgaattggccaaaaatctgtgggaggaaaaagaaagaaggaaagtcgatcaatcttcaaattaataaaagctatttttatgtgatgcttctgcaatggaaggtcctgccacacgtagaatattgtctgggttaatgttcttatcatacatacttgtacaataaacccacctcaatagttttattaaattcatataggtaagcaaaatagcaattcactttgttcaaaaatattaaaagttgcagatatggttgaagtttcttttgaatttaccttcaatctctcagatctgcctccttactcaaaaggagctgcatcactctgatatctacttattattatacaaaatgtccagctttttatccaggttttttctatgaatttacatagaaatttagtcagagaaaataagcacattcttttgtttttacagtaataatagcctacctacatagtttagctgtgtggggtgacactgttacgcgt

SEQ ID NO: 7918 - protein, 81 aa, Homo sapiens [sequence omitted]

SEQ ID NO: 7919 - DNA, 427 bp, Homo sapiens
aaatttgcccatggcaaggagtgggctttgaacccaagctgtcccacctcagaggcactgggtttagcctccgagctacagtgtccaagggctgtctgcgacagtgctgcagcaggggcggactgaaaggtgcgaaaggaagttgcctgcgatggagcagctcgaagcatccaggaggcggcctggagatgccttgtgggaagaagtacaggccagatggaagcaggtaggtcaagccgaggtggagaccatggccaaggggatcttttttataaaaaaggaagatcacttaaaacagaggtcagagctaggcagagtcaggaccatggggtgttgtgagtggacaaaggatcaaggctccacagacacctctggccccgtcgcctgctgcccacagcttgcataagtggggatcatgatggcctta

SEQ ID NO: 7920 - protein, 84 aa, Homo sapiens [sequence omitted]

SEQ ID NO: 7921 - DNA, 346 bp, Homo sapiens
  misc_feature (140)..(140): Wherein n may be a, c, g or t
tcatgaaccacaaaccataaacaatcgtgcaattcagctgcaagttattattccagaggcttctggggggcaaagccctgtccttattccacattgtgtcccagagcctggcacagggcctgatgaatggcaggagctcnagctttgcttgttgaatgaatgaatgagggaatgaatgacagagtggatatgtcatccagtttgacaattcaatccaaccaactatcgctgagggcctactatgtgcaggagctgggctgggcactgaggaaaatcacaaataacagatgggtttttttttttttttgaaacgggagttccattcttgttgcccgggctggagtgc

SEQ ID NO: 7922 - protein, 65 aa, Homo sapiens [sequence omitted]

SEQ ID NO: 7923 - DNA, 177 bp, Homo sapiens
  misc_feature (1)..(1): Wherein n may be a, c, g or t
ncagcattcgctccccatcccgatcatctggtgccgggcactgtgcgcgtggtgtcgctgcgcatggattatttgccagccgacacccaaatggcgcaactgctggcaaagccagagaaagcctacatatcccgttacgccctcggccgcgattaccacaagctgatccgcaaacgc

SEQ ID NO: 7924 - protein, 59 aa, Homo sapiens
  misc_feature (1)..(1): Wherein Xaa may be any naturally occuring amino acid
XAFAPHPDHLVPGTVRVVSLRMDYLPADTQMAQLLAKPEKAYISRYALGRDYHKLIRKR

SEQ ID NO: 7925 - DNA, 372 bp, Homo sapiens
  misc_feature (1)..(1): Wherein n may be a, c, g or t
  misc_feature (257)..(257): Wherein n may be a, c, g or t
  misc_feature (300)..(300): Wherein n may be a, c, g or t
  misc_feature (339)..(339): Wherein n may be a, c, g or t
  misc_feature (359)..(359): Wherein n may be a, c, g or t
  misc_feature (365)..(365): Wherein n may be a, c, g or t
ngtgcactttaccaagctaacttcagggatgcacgtgttgagtcatcaaaccagaacaaacatgaaactggaaacacaagagaaccttccaaatataaaagctgtataaagtgtttaaatttgtgttctgatattggtctaaatcaaggagtccacataggaaagaaagaacacagtggtacagtgcttaataaggtttttgactctaaacaaatactcagactgaaacaaaccaatactggaaagaaacctttganatgtagtgaatgtgccagatgcttcatcaagaaatgtaagctntagacacatcagacaactcatagacgagagaaaccttantaatgtagtgaaagtgacanatgctnttcccag

SEQ ID NO: 7926 - protein, 100 aa, Homo sapiens
  misc_feature (1)..(1): Wherein Xaa may be any naturally occuring amino acid
  misc_feature (86)..(86): Wherein Xaa may be any naturally occuring amino acid
XALYQANFRDARVESSNQNKHETGNTREPSKYKSCIKCLNLCSDIGLNQGVHIGKKEHSGTVLNKVFDSKQILRLKQTNTGKKPLXCSECARCFIKKCKL

SEQ ID NO: 7927 - DNA, 250 bp, Homo sapiens
  misc_feature (250)..(250): Wherein n may be a, c, g or t
gctagcacctacctaagccatcaagaaaagcttctactagaaggagagaaatatttacaaagtaaggaggatctgagattaatgctcatagaattaaagaagaaacaggaagcaggctttgctctacaacatggtctgcaggagaagaaagctcagttaaagatttataagaaattcctcaagaaagcccaagatttgacatccttgctaaaggagttaaaatctcagggaaactacctcttggagtgcn

SEQ ID NO: 7928 - protein, 56 aa, Homo sapiens
MLIELKKKQEAGFALQHGLQEKKAQLKIYKKFLKKAQDLTSLLKELKSQGNYLLEC

SEQ ID NO: 7929 - DNA, 360 bp, Homo sapiens
ttggccatggatttggctcgcaagttcagtcccaaagatgtcacgctctatctaatggacttcgggaccaatggtgtggcaccactaggccaattaccacaggtggccgacaccttgcttttggatcatacggagaagattgccaagtttgtacgcatcatggagcgggagctcaaccggcgtaagaagctcttgtccgactacggtgttggtacactagagctctaccgtcaggctagcggtcagcaagagccggccatcgtcatcctgctggacagttatgagtccatgaaggaagaggcctatgaagcggagctcttcacgctcttggtgcggatctcccgggaaggtctcagcatc

SEQ ID NO: 7930 - protein, 120 aa, Homo sapiens
LAMDLARKFSPKDVTLYLMDFGTNGVAPLGQLPQVADTLLLDHTEKIAKFVRIMERELNRRKKLLSDYGVGTLELYRQASGQQEPAIVILLDSYESMKEEAYEAELFTLLVRISREGLSI

SEQ ID NO: 7931 - DNA, 256 bp, Homo sapiens
tcatgaagatcatattctctgcctataagacaatgaaattagaaatcaataacaataacaataaaataaccaaaaatatgcaggtctgctgatttccaacttaagcagctcccttctccattcccaagtagaagcatggagaaacttccacagctcacacctgaagctggggacctaggtacagcggagtggaggatgcagcccatgccatctctctaggtgtaaacaagccgcactgtcatttcccactactcaa

SEQ ID NO: 7932 - protein, 55 aa, Homo sapiens [sequence omitted]

SEQ ID NO: 7933 - DNA, 595 bp, Homo sapiens
gatctgacgcccatccaggtccactctcatgatgagctaggcgatcttgccgtgtcgttcagcaacatgctgtcctcgttgtcgaactcccgggagcgtcagaagcagctcatcgctgacgcctcccacgaactgcgaacccccctgacctcgatgcgcaccaacgtcgagttgctgatagccgaccagaagagccacatgctcccggaggaagcacgcggggagatccttgacgacgtggccgcccagcttggtgagttctccagcctcattggcgacctcgtccagctctcgcgcgaggacgctcctcccccgcgtccggagtatttcgacttgtcatatgcggtatctaaagcagtcgagaggggacgacgacgcggcccgaacctggaattcgacgtccacctggagtcccatttggtgctgggtgacgaggccaccttggagcgggctgtcaccaacctgctcgataatgcggtgaagttctcgcccgccggtggaactgtgacggtaactatggagggcgacaccgtcatcgtcagtgacgaaggacctggcatcacagaagccgatcttcctcatatcttcgaccggt

SEQ ID NO: 7934 - protein, 198 aa, Homo sapiens
DLTPIQVHSHDELGDLAVSFSNMLSSLSNSRERQKQLIADASHELRTPLTSMRTNVELLIADQKSHMLPEEARGEILDDVAAQLGEFSSLIGDLVQLSREDAPPPRPEYFDLSYAVSKAVERGRRRGPNLEFDVHLESHLVLGDEATLERAVTNLLDNAVKFSPAGGTVTVTMEGDTVIVSDEGPGITEADLPHIFDR

SEQ ID NO: 7935 - DNA, 358 bp, Homo sapiens
ggatcctaacagagctgaatggggttgctgtgaatatctccctagtaagataggaaaaaggcccatgtgggctatgatatttgtataaagtggtgtcgatgagctcattgcaggactagctatttgaacttaagtttcaatgaagtgtaaatgagaactgacttcacccttgacttttatttttctctccaagtatttctcactagccattttcatttcctccttttcctaccattctcaccctcatttttctaccctcttcttgaagcagagcactttttctccacactctggaaggccagagaggagagaggattagaggcccgtagcaggggaaatcctatcattagaaaagaca

SEQ ID NO: 7936 - protein, 69 aa, Homo sapiens [sequence omitted]

SEQ ID NO: 7937 - DNA, 193 bp, Homo sapiens
  misc_feature (1)..(1): Wherein n may be a, c, g or t
  misc_feature (2)..(2): Wherein n may be a, c, g or t
  misc_feature (139)..(139): Wherein n may be a, c, g or t
  misc_feature (140)..(140): Wherein n may be a, c, g or t
  misc_feature (193)..(193): Wherein n may be a, c, g or t
nnccccctccatatactcccctcccaggcccgcgcacataccccccatacacatccacagacgcatacacacacgacacacaccatacacacacacaacccataccccatacccacatgcacacgtgacacacaccatnnacacacaacccatacaccagacacacaccatacacacatgcacaccccccccn

SEQ ID NO: 7938 - protein, 64 aa, Homo sapiens
  misc_feature (1)..(1): Wherein Xaa may be any naturally occuring amino acid
  misc_feature (47)..(47): Wherein Xaa may be any naturally occuring amino acid
XPLHILPSQARAHTPHTHPQTHTHTTHTIHTHNPYPIPTCTRDTHHXHTTHTPDTHHTHMHTPP

SEQ ID NO: 7939 - DNA, 342 bp, Homo sapiens
  misc_feature (1)..(1): Wherein n may be a, c, g or t
  misc_feature (342)..(342): Wherein n may be a, c, g or t
naagcttcgtggccgcgataccgctaggtcgtcggtggtgtcggggtgtgcggtcgttcgctgtgttgttcgaccttcctgcctgagccgtcgtcggtgccgaatcgccttgtcagcgagcaggggatggcctccaaccccttggcggtgactggggcatgcggcaaacttatgtgctgcctgcgttacgagtcaccttattacgctgatttcgaggctgccctcggagaggtcagggtcccccgaatgctcgagatgtcggctatgccgacgtgttctcgcagacgggaccaggagcacaaggacgcctgactccaggaggaacttcatgacaccacccgn

SEQ ID NO: 7940 - protein, 94 aa, Homo sapiens
VVGGVGVCGRSLCCSTFLPEPSSVPNRLVSEQGMASNPLAVTGACGKLMCCLRYESPYYADFEAALGEVRVPRMLEMSAMPTCSRRRDQEHKDA

SEQ ID NO: 7941 - DNA, 283 bp, Homo sapiens
gtgcacttaggagcacacaggagtgtctgcaaaactgggtgtatgagtatgttcatttcttcttgtgggttcctgagagtttgtgtattgggcagtaggtcacagtgtggctatttcatgaccctggaatttggcacaagagagtgtgtctgtggaaatggttgtgcgtccctttggctctgtgtctgtggggtcatcatgtcagagactcatgtaatgaggggtggggatttccaggtgtttgcccatgtgtctgtagcagtgtgtggcatgtctatgaatg

SEQ ID NO: 7942 - protein, 80 aa, Homo sapiens
MSMFISSCGFLRVCVLGSRSQCGYFMTLEFGTRECVCGNGCASLWLCVCGVIMSETHVMRGGDFQVFAHVSVAVCGMSMN

SEQ ID NO: 7943 - DNA, 371 bp, Homo sapiens
  misc_feature (25)..(25): Wherein n may be a, c, g or t
  misc_feature (198)..(198): Wherein n may be a, c, g or t
cggccgacacgtattttcttattanagccccattttcagctgggaagactgaggcacggggaggttcgatcccttgctggaggccacacacctcaggactggaatatacataaaacaatataacaaagcaacacaccctaacatagccgttacccaaggtccccaaagacggggaggccatcatacaaggcatagaanaggcagcagggaggcctcaggggagccggtgcccaacaggccagagcttctggcacaagccaaggccatctactgcctgctgttccggggccctcctccgctggggcagctcccagcaggggcatgttgctctcttctcatcgctaggacgtgcatgctcgggggcagagcgg

SEQ ID NO: 7944 - protein, 64 aa, Homo sapiens
  misc_feature (57)..(57): Wherein Xaa may be any naturally occuring amino acid
MPCMMASPSLGTLGNGYVRVCCFVILFYVYSSPEVCGLQQGIEPPRASVFPAENGAXIRKYVSA

SEQ ID NO: 7945 - DNA, 234 bp, Homo sapiens
atcatgcaaaactttagagctaccgccattcatggtgaccgtacccaatctgagagagaacgtgccttggccgccttcagatctggtgccgctactttattggttgccacagctgtcgcagctagaggtctagatattccaaacgtcacccacgttatcaactacgatttaccaagtgatgtcgatgattacgtccatagaattggtagaactggtcgtgccggtaacaccggt

SEQ ID NO: 7946 - protein, 78 aa, Homo sapiens
IMQNFRATAIHGDRTQSERERALAAFRSGAATLLVATAVAARGLDIPNVTHVINYDLPSDVDDYVHRIGRTGRAGNTG

SEQ ID NO: 7947 - DNA, 221 bp, Homo sapiens
  misc_feature (103)..(103): Wherein n may be a, c, g or t
  misc_feature (104)..(104): Wherein n may be a, c, g or t
caccgctgcagaacagaaagagccccagccccttggctttctgcccctgtccccctgtcaactccatctccaaggagctcccatttttcctccacgccttctnnaccctggatacccacttttcctgcctccaccccacctgttcacctatggggccctaccttctgaccaatgtccccacctcctcatgctgccccaagacccctcctaccccaccatgg

SEQ ID NO: 7948 - protein, 55 aa, Homo sapiens
  misc_feature (35)..(35): Wherein Xaa may be any naturally occuring amino acid
HRCRTERAPAPWLSAPVPLSTPSPRSSHFSSTPSXPWIPTFPASTPPVHLWGPTF

SEQ ID NO: 7949 - DNA, 378 bp, Homo sapiens
  misc_feature (1)..(1): Wherein n may be a, c, g or t
  misc_feature (2)..(2): Wherein n may be a, c, g or t
  misc_feature (304)..(304): Wherein n may be a, c, g or t
nnggcgaccgggcagggcggggactctgggccacctgctgtctggagaaccggggggggggcacggggtgcatgtggcctaggagcggcctccgcttgggcctcgcccccggcaggagttgggggctccaggccactcccgggagaaggagggctgccaggtcacgcccctgggaaagggggctccgggccaccccctcgggaaaagtggagctcacaggtcacgtccccgggagaagggggctcccaggttcccacccccgcagaatggggcctctgggccacacccccgagagaaggggagnctcccaggccatgcccgcgggagaaggggggctccggtccacgccctcgggagaagtggagctcacagttcacg

SEQ ID NO: 7950 - protein, 126 aa, Homo sapiens
  misc_feature (1)..(1): Wherein Xaa may be any naturally occuring amino acid
  misc_feature (102)..(102): Wherein Xaa may be any naturally occuring amino acid
XATGQGGDSGPPAVWRTGGGARGACGLGAASAWASPPAGVGGSRPLPGEGGLPGHAPGKGGSGPPPREKWSSQVTSPGEGGSQVPTPAEWGLWATPPREGEXPRPCPREKGGSGPRPREKWSSQFT

SEQ ID NO: 7951 - DNA, 309 bp, Homo sapiens
  misc_feature (1)..(1): Wherein n may be a, c, g or t
  misc_feature (2)..(2): Wherein n may be a, c, g or t
  misc_feature (4)..(4): Wherein n may be a, c, g or t
  misc_feature (10)..(10): Wherein n may be a, c, g or t
  misc_feature (11)..(11): Wherein n may be a, c, g or t
  misc_feature (12)..(12): Wherein n may be a, c, g or t
  misc_feature (14)..(14): Wherein n may be a, c, g or t
  misc_feature (15)..(15): Wherein n may be a, c, g or t
nngngggggnnngnngcaaatgttgtgcgattcattggtgcttgcacaaaaccaccacaattttgcataattacagaatacatgtctggaggaagcttatatgactttgtgcacaagcagcataacgttctaaacctcacgactctattgaagtttgcagttgatgtatgccgagggatgtgctacttgcatgaaaggggtatcatccatagagacttaaagactgccaaccttctaatggacaacgatcatgctgtgaaagtggctgattttggcgtagctcggttccaggatcaaggaggtatcatg

SEQ ID NO: 7952 - protein, 103 aa, Homo sapiens
  misc_feature (1)..(1): Wherein Xaa may be any naturally occuring amino acid
  misc_feature (2)..(2): Wherein Xaa may be any naturally occuring amino acid
  misc_feature (4)..(4): Wherein Xaa may be any naturally occuring amino acid
  misc_feature (5)..(5): Wherein Xaa may be any naturally occuring amino acid
XXGXXANVVRFIGACTKPPQFCIITEYMSGGSLYDFVHKQHNVLNLTTLLKFAVDVCRGMCYLHERGIIHRDLKTANLLMDNDHAVKVADFGVARFQDQGGIM

SEQ ID NO: 7953 - DNA, 342 bp, Homo sapiens
  misc_feature (1)..(1): Wherein n may be a, c, g or t
nagatctccaaagcccgtgacaaatctccctgccgcagccaggtgagcgaaaggcgagtggcctcttccaccctctgcttctcccctcccgattttggctctgaccccaaattctcgcagggctgcccacctagaactcaggataaggccaccccttcccctccaccttcccccatttttctgttaaaggtgcccattattgcccttgaaaaccggcaaacctttaacttcaaaggcctgttgaacctgttaaaccggttgcaaaccaccggggcccacaaccaaaggggccttttaaggaaaaagaacttgttctttccaaatttcttgcacttgcccgcc

SEQ ID NO: 7954 - protein, 114 aa, Homo sapiens
  misc_feature (1)..(1): Wherein Xaa may be any naturally occuring amino acid
XISKARDKSPCRSQVSERRVASSTLCFSPPDFGSDPKFSQGCPPRTQDKATPSPPPSPIFLLKVPIIALENRQTFNFKGLLNLLNRLQTTGAHNQRGLLRKKNLFFPNFLHLPA

SEQ ID NO: 7955 - DNA, 236 bp, Homo sapiens
tgtacactttaaaagggtaaagtatacagtgtgtgaattatatatttttttaatgagggaaaatgatgaccaaaaaaaaaaaaaaaaaaaatttttgccttcgggaccccctttcttttccccctttttttccattggggtcggccgggccctcttttttttttctggggttttccctccccttttttccccccttttttcccccatggaccctccacccctgggttttcggggtt

SEQ ID NO: 7956 - protein, 69 aa, Homo sapiens
MGEKRGEKRGGKTPEKKKRARPTPMEKKGEKKGGPEGKNFFFFFFWSSFSLIKKIYNSHTVYFTLLKCT

SEQ ID NO: 7957 - DNA, 302 bp, Homo sapiens
accggtgccggcccctctgaggtcctcagcaggtgagtcggggaagcagccgcacaacccacagcgccacagccacaagcagcctctgttcactttcacaacaaagtgcaacagccaaagcgtctggaaatcattccttaaacgaacactcattaagcgcctaccacgtgtggcaccagcgcacagcagcagtcaaaaacctcccgcgagaagctcagccccacggaggcagacccaggagcaagtccacagcggcatcggcacccgccgggctgtgacacgtgtgccaggcagtgcgggct

SEQ ID NO: 7958 - protein, 51 aa, Homo sapiens
MSVRLRNDFQTLWLLHFVVKVNRGCLWLWRCGLCGCFPDSPAEDLRGAGTG

SEQ ID NO: 7959 - DNA, 502 bp, Homo sapiens
aagcttgtccttatacagcaagtctgtcttattctttagcaccagctggagtcccgtttctaatttgctgtgaagaattaagtgatttgagacccataccctggagtatttgacctccaatgtcaaccagctagcttgcaattcccttggctggaaagtttctccagaattgatttgaactaacatcagttaaaacactctgaaatatggtagtaaatatcattgcaaatctgagtatgactttatagccgtgaaaataaacacactgtagaatattaaagaaaagagtttaggagcatggagagccttgaagatcagaaatgttgtggcaatagaacgattcacctcagggtcgtcagtttaagtctggcacagttggttcgctacactgtctgaagatggttgtttgtagcatatgttaactgtgccagtgcttgcaaattcatttcatagggttcaggtccatttgtcataaaacagttattcctgttattttcaattg

SEQ ID NO: 7960 - protein, 62 aa, Homo sapiens
MLVQINSGETFQPRELQASWLTLEVKYSRVWVSNHLILHSKLETGLQLVLKNKTDLLYKDKL

SEQ ID NO: 7961 - DNA, 674 bp, Homo sapiens
gctagccatttagaaatgtaacaatactattattatttttcagactgtgagtgtctttaaaaattagaatcaaaaacaagaaacaactgtaaaataattaagaagtcaggtgcatgctaggtctaataaatgagttaacacccatgaaagcccttagtacactagagtcacatgactatgttagattgtgacaacgtctaagaaaacaaaagccatgacatctgatcaagcttgggatgcgatcatcaattttactgtaggaaatgccttagtgaagattctcagtacatctttggctttctgaagcatatagatcttttcctaccataaaaggatgaagtcagttttttaggtacaaagctataccattttcctatttgtcctaaaagcaagttcaagctgagaaaccatcttaaggtttgaatgaggaagttctgataaaaaagaaagtacagaaaaaccaactcgaaattctactgggaggcaatgttcagccatttctttgtcaagaaagttctgaacacaaaagggcttcaatggggatggcatgcccaagtggacttttctcacaaatgcatataacggacagatttggaatgtgctgttctttctgctaaagatatttttccactcttggccttccaaaacccagagttcaaagcttaactactagt

SEQ ID NO: 7962 - protein, 62 aa, Homo sapiens [sequence omitted]

SEQ ID NO: 7963 - DNA, 381 bp, Homo sapiens
gtgcacgacaagaaagacttcgccgttcccgcaaatagctacggtgacgatgtagaagcaatcctcattggagaagaggaactacaaaaccgcgtccaagagctcgcggatatagtctctgaaaagtatgccgatgctgagcaagacctgcttttggtctgcgtgctcaagggcgcggctttcttcctgacggacttcgcgcgcaagctatccatcccctccgagctggagtttatggccgtgtcctcttatggcgcctccacttcttcttccggcgtggtgcgcattttgaaggacttggaccgcgatattgcggggcgcaacgtgctcatcgtggaagacatcatcgattccggcctcactctgtcgtggctcatccgg

SEQ ID NO: 7964 - protein, 127 aa, Homo sapiens
VHDKKDFAVPANSYGDDVEAILIGEEELQNRVQELADIVSEKYADAEQDLLLVCVLKGAAFFLTDFARKLSIPSELEFMAVSSYGASTSSSGVVRILKDLDRDIAGRNVLIVEDIIDSGLTLSWLIR

SEQ ID NO: 7965 - DNA, 333 bp, Homo sapiens
gtcgacttcgaccaagttcgcgtgtaccaggctggcgacgatgtgcgcaccatcgactggcgcgtgacggcccgcacccaggagccgcacaccaagctgtttcatgaagaacgtgaacggccgattttcatcatggttgagcaaagctgtcggctgttcttcggctccgggcaaatgttcaaatcggtactcgccgcccaagccgccagtttgatcggctgggccgcgctggggcacaacgaccgcgtcggcgggttggtgttcggcgacagcgagcactacgaaatcaagccccggcgcagtaaacaaagcctgctgcaattgcttaccgcc

SEQ ID NO: 7966 - protein, 111 aa, Homo sapiens
VDFDQVRVYQAGDDVRTIDWRVTARTQEPHTKLFHEERERPIFIMVEQSCRLFFGSGQMFKSVLAAQAASLIGWAALGHNDRVGGLVFGDSEHYEIKPRRSKQSLLQLLTA

SEQ ID NO: 7967 - DNA, 349 bp, Homo sapiens
acgcgtgctcctccaggcccgtacctctcgcacaatttcccacaatcggctccactctccctcgccttttgtccttttgaggacgtgctgggcgtgggccactccaagggctttgactcgctgctgatccccggagcgggagaggcgcgctacgacggcatggagctggaccccttcgagggcaagacggcgcgcagggagcgcgaggtgaggggcctgctggataagatccagccggatatgatcagcgtggacccttctttcccgggtagagtgcaggaaaatggagtgaaagggagggtggagccgcgcgaggaaggggcgggagagctaaagaaggctgggatcc

SEQ ID NO: 7968 - protein, 116 aa, Homo sapiens
TRAPPGPYLSHNFPQSAPLSLAFCPFEDVLGVGHSKGFDSLLIPGAGEARYDGMELDPFEGKTARREREVRGLLDKIQPDMISVDPSFPGRVQENGVKGRVEPREEGAGELKKAGI

SEQ ID NO: 7969 - DNA, 228 bp, Homo sapiens
cctcttgggaccccagccttgggagctgctggggcagatggtcccctgcctggcccccccttgggatgagaggctcaaccacagtgggcaatgggattgctgctggatctcccaagagaacggtgccaggcagtgggaggatgccgggtcctgccctccaagaagccggccgacgtccacacccgaaagcggcctttccacctccacccagccagggaggtgctgacc

SEQ ID NO: 7970 - protein, 62 aa, Homo sapiens [sequence omitted]

SEQ ID NO: 7971 - DNA, 324 bp, Homo sapiens
tgatcagaggaaagaaaatgaatgcacatgcaacagcttcaggtgaaaatacacagtccttgttcattgccatgtcatagaccacaagtagaatgagtagaaatttaaagatggaaaacctctggggttggggtatctgtgttaggttcaggaatgttctgggtgatggggcaggacttttactcaacttgtagagtattaatatactgtgagaggtaatcattaatggcatatgttaaccgtcagtgaatggaggcggaaatagtttgagaactactaccagatgaaggaggaaatagaagtgccaggaaaacagaccaagga

SEQ ID NO: 7972 - protein, 77 aa, Homo sapiens [sequence omitted]

SEQ ID NO: 7973 - DNA, 220 bp, Homo sapiens
actagtcgatgttttgcagcagggagccagatccccggccggtggcccaggcgaagcctgggtcgctgcccacaggagcgatttcagggagccgggaagagctccccgtgcagccgcgcggggctcgagggtggcggagcgtgccggggcgcttgaatggagtctggctcgtacctgcggcaaggctcgaacgcccgcctgcccacctgccactagatct

SEQ ID NO: 7974 - protein, 70 aa, Homo sapiens
MFCSREPDPRPVAQAKPGSLPTGAISGSREELPVQPRGARGWRSVPGRLNGVWLVPAARLERPPAHLPLD

SEQ ID NO: 7975 - DNA, 1080 bp, Homo sapiens
gaattcaagtggacacaggctccacgcccgcgtctcaccgataagagctacaagcacaactactatgacgagcgggtttcgctcgaagagcgtcttgagcgcactgtggctaaggatttcgtcacgacggaggtcgagcccatgtgggatgcggctgatgtcatgcggatgggtaaggatctcttcatccagcacggtctgacgacaaatcggaagtcaatggagtggtttaagcgttactaccccgatttccgcgttcacgcggtgaatttccctggggatccgtacccgatccatatcgacgcgacctttgtgccgcttcgtccggggctcatcatcaacaacccgaatcgtccactgccgcaggagcagaggaagatcttcgaggccaatgactggcagatcgttgatgctgctcagccggcgcacgacacgcctccagaattgtgctactcgtctgtgtggctatcaatgaactgcttggtacttgatccgaagacggtcatctgcgaggcttcggaagttcatcagatggagcagatggacaagctgggtatgaacgtcatcccggtcgccttccgtgacgcgtacccattcggtggaggtctccactgcgccacagctgatgtatatcgcgaaggtacctgtgaggactacttcccgaatcaggtcgacgacccgaccttggtgtgagaaaaccccgtggtcatgtcatgactgacggatctcggtggctcggtacggaacttacgttgtccgttaccgggccgccgggtctgatatggcagtatcacgcctagcaaaaaggagcatgtcatggacatggagccgggcatcatcaacgtcaaacaggaagttccaggcgtcggtacgatgaaccagaaagtgggattcgtgtccatgcttctttctgcaacgggtatggggttggtgggtactttcgggcgtctcagcactcctgtggatcccacgacgggcagtaagtacatcatcggtgattttttggccactggtaggatgatagtcggggtcctgggatttctgcttattatcgtcatacttggaaaatggtctgagctc

SEQ ID NO: 7976 - protein, 230 aa, Homo sapiens
EFKWTQAPRPRLTDKSYKHNYYDERVSLEERLERTVAKDFVTTEVEPMWDAADVMRMGKDLFIQHGLTTNRKSMEWFKRYYPDFRVHAVNFPGDPYPIHIDATFVPLRPGLIINNPNRPLPQEQRKIFEANDWQIVDAAQPAHDTPPELCYSSVWLSMNCLVLDPKTVICEASEVHQMEQMDKLGMNVIPVAFRDAYPFGGGLHCATADVYREGTCEDYFPNQVDDPTLV

SEQ ID NO: 7977 - DNA, 245 bp, Homo sapiens
cgttaataagcatggccatcactagggaccatttctcacctatttttgttacgagccatccagcaggcacatctccgatgatttggccgataccgacaagcgcggcaatcgcggcagcgagggctgccgatgccccgatatgtactgcggtgagtgggatgagtggaatcacggcgccgtagcccagggaggacatcagcgtcggtaggtaggccgaaacgatgatcgacgaccacttcaccggt

SEQ ID NO: 7978 - protein, 65 aa, Homo sapiens
MSSLGYGAVIPLIPLTAVHIGASAALAAAIAALVGIGQIIGDVPAGWLVTKIGEKWSLVMAMLIN

SEQ ID NO: 7979 - DNA, 249 bp, Homo sapiens
acgcgtgcgaagtttcgccgcatatgtgcccactctgctcgatgccggctggcgaccaccaccactgcccgacgaggtgacgttgcagacccattgccacgagtacgcggtgttcggcgcccgggtcggcatcaccgccctggaggccctgggggtcaccgtgcacaccgcggacggttgttgcggcgtggcaggcaacttcggtttcgagaaggtcactacgggtgagcatggccggcgccgaaaacg

SEQ ID NO: 7980 - protein, 77 aa, Homo sapiens
MLTRSDLLETEVACHAATTVRGVHGDPQGLQGGDADPGAEHRVLVAMGLQRHLVGQWWWSPAGIEQSGHICGETSHA

SEQ ID NO: 7981 - DNA, 252 bp, Homo sapiens
cacagtcacatgaccaacacacgcattacggatccagagattctggagagtcggtatccagttatcctgcgccgctttgagctgaggccaggctccgggggccgaggtcgcttccggggaggtgatggcgtagtccgagagctggtctttcgggaagaggcgctgttgtctgtgctcaccgagcgccgggccttccagccttacggcctccacgggggagaacctggtgcgcgtggcttaaacctcctgatc

SEQ ID NO: 7982 - protein, 84 aa, Homo sapiens
HSHMTNTRITDPEILESRYPVILRRFELRPGSGGRGRFRGGDGVVRELVFREEALLSVLTERRAFQPYGLHGGEPGARGLNLLI

SEQ ID NO: 7983 - DNA, 381 bp, Homo sapiens
  misc_feature (1)..(1): Wherein n may be a, c, g or t
ncaccttgtcgattcctccagttaccagcttgccggtgaatcgatcacccacggaagcaacagcaccctgcatgagcccggccgtgtcctcaacccgtacacttgtgcatggaccgcgcttcttccgggcctggccccggcatccaccatccgcttgtaaatgggcgagtgctctagcagttgctcatgggtctgcttggctatgaagtcgcgtgcattgccaacaccttcgccggcggcatggcgcacccactgccccactcgccgacctccttgtttcctgccacgctcttgatgcccagatcagacgcaatgccttcgctcagctcttgcgttccctcctccaagccagaaaccgctgcgccggctgctgcccgtccc

SEQ ID NO: 7984 - protein, 65 aa, Homo sapiens
MGLLGYEVACIANTFAGGMAHPLPHSPTSLFPATLLMPRSDAMPSLSSCVPSSKPETAAPAAARP

SEQ ID NO: 7985 - DNA, 403 bp, Homo sapiens
  misc_feature (41)..(41): Wherein n may be a, c, g or t
  misc_feature (103)..(103): Wherein n may be a, c, g or t
  misc_feature (104)..(104): Wherein n may be a, c, g or t
gatgcctgtactcccatgtttattgcagcattattcacaanagctatgttagggaatcaacctaagcatccatcgagggatgaatgggtaatgagaatgtggnntgtatacacaatggaatactattcagccttaaaaaaggaagaaattctgtcctttgtggcagcatagagggaactggagatcaatatgctaagtgaaataagccaatacacaaagacaaatgccacatgttctgcctacatgtgaaatctaaaagagttgagctcttagaagcagagagtggaatggtagttacctgagactggggactggggagtagggaatgagaagatgataatcaaagggcacaaagcctcacttagatagaggaaagaaatgtgaggctttttttgatcaattg

SEQ ID NO: 7986 - protein, 56 aa, Homo sapiens
  misc_feature (14)..(14): Wherein Xaa may be any naturally occuring amino acid
  misc_feature (35)..(35): Wherein Xaa may be any naturally occuring amino acid
DACTPMFIAALFTXAMLGNQPKHPSRDEWVMRMWXVYTMEYYSALKKEEILSFVAA

SEQ ID NO: 7987 - DNA, 324 bp, Homo sapiens
  misc_feature (280)..(280): Wherein n may be a, c, g or t
cctaggatctgaaggggagaaaacaacaaccagaaaactcctcaaagcccaacttccttgaggaagatagctgtgcgtgggttggtgactcaggctgtgacagagttccaaggtttttctggaaactgcagtgctttgaatagaagcattagcatggtgagctaaggctgttcgaggccatttcttgaagctgacacctgtgtgcagttcagtagaggtggatacaaggtccagtgcagggaggactggccccatctggacagagtccaccggaggtagngcagacctcaggtccccgggaaggaagatgagggagacgggccc

SEQ ID NO: 7988 - protein, 85 aa, Homo sapiens
MGPVLPALDLVSTSTELHTGVSFKKWPRTALAHHANASIQSTAVSRKTLELCHSLSHQPTHSYLPQGSWALRSFLVVVFSPSDPR

SEQ ID NO: 7989 - DNA, 171 bp, Homo sapiens
  misc_feature (1)..(1): Wherein n may be a, c, g or t
ngccagcacagtgtccgctgctgggcggggtgtcggcggatcggtcggttggtttcggcttcggtgtcgctgcgtttgagttgggccgtcatggctgagttggatccatttggcgctcccgccggtgcgcccggtggccccgcgctcgggaacggggtggcgggcgccggc

SEQ ID NO: 7990 - protein, 57 aa, Homo sapiens
  misc_feature (1)..(1): Wherein Xaa may be any naturally occuring amino acid
XQHSVRCWAGCRRIGRLVSASVSLRLSWAVMAELDPFGAPAGAPGGPALGNGVAGAG

SEQ ID NO: 7991 - DNA, 297 bp, Homo sapiens
  misc_feature (1)..(1): Wherein n may be a, c, g or t
ntccggaacataggttatctaatttacccgcaaatctcctagcgtctggctcacgagctctggctcacttcatttgtacagccttaatctgtacagtgccgacgtatatcctcgagtcgacagaagttcggccacgttagcgatgacatgaccacaccacaggcagaccgggaggacggtgaggtaatgagcgccgcgacgggccagagtgccacccaccatggtctgccggaccgtttcggacggctggctaccgacctgcgggtctcggtaaccgaccattgcaacctgaggtgc

SEQ ID NO: 7992 - protein, 50 aa, Homo sapiens
MTTPQADREDGEVMSAATGQSATHHGLPDRFGRLATDLRVSVTDHCNLRC

SEQ ID NO: 7993 - DNA, 579 bp, Homo sapiens
gtgcactacgcggggctgcgtgccggcctggtggttgatcgcttgcagggggagtttcaaaccgtgatcaagccactcggcaaagtgttcggtgaagcccatgggctcgggggattcacgatcctgggcaacggcgctgttgcgctgattctggatgttcccaatttgttaggactcgttgccaaggaagccaataaccgttcgattccaagtcctcagtcgacttaatgaagcgtcatcaggagttcctcgccatgaccgttatcaaaaatataatgttgttggttttcacggcagtgctgggtgtcctcgtattgggtggcaccagcctgtacctggccggtgaaatcaattcgagcgccagttacggcaacgccaacacggtgcccagcctgctggaaatcgaccaggtcgcaacggctgtaggcgaccttcatggtttgcaatggcagcacttgaacgatcccgggaaaagtgtcctcccgggttacgcgcagagcgtggcacagcacttcagttcaattggcaaagccctggatcactatgaggccgagttggtctctgacgaccatgacgcgt

SEQ ID NO: 7994 - protein, 75 aa, Homo sapiens
VHYAGLRAGLVVDRLQGEFQTVIKPLGKVFGEAHGLGGFTILGNGAVALILDVPNLLGLVAKEANNRSIPSPQST

SEQ ID NO: 7995 - DNA, 400 bp, Homo sapiens
ggatcctcatatctgtaagtgaacagaaaaactgttggtaggctgactgaataccacatataagggacactatttttcataaagtctatgcttggttatttaaggttaattcatagcagctttgtaattatgcactctcaaataactcaaactacaaagcttattcaatggaaaccaactttttattacacttacataccaatattggaaatcaatgatgtaactatttacttcactaagtaacttttaaaggactcctgatctgagatggttaatgcccagcagtatgaagcaaagctggaaaggaaaggctgagggagaagagagaacttcctttcctttatctggcagcagccacacaagaaggaccaactaagagacaagcaaggcttgagaattc

SEQ ID NO: 7996 - protein, 51 aa, Homo sapiens
MLGYLRLIHSSFVIMHSQITQTTKLIQWKPTFYYTYIPILEINDVTIYFTK

SEQ ID NO: 7997 - DNA, 223 bp, Homo sapiens
gccagcccccaccaggattatgtgcgcgactacgtacgtcgcaccttgagcggcgagctcgacgacctgctgatctaccgcaagcgcctgcgccggcaactgggtgactacgagcgcaacgtaccgccccacgtgcgtgccgcgcggctggccgacgaatacaacgaccgccagggtcgcccgcgccagtaccagaacggtggctggataagctacgtgatca

SEQ ID NO: 7998 - protein, 74 aa, Homo sapiens
ASPHQDYVRDYVRRTLSGELDDLLIYRKRLRRQLGDYERNVPPHVRAARLADEYNDRQGRPRQYQNGGWISYVI

SEQ ID NO: 7999 - DNA, 227 bp, Homo sapiens
  misc_feature (156)..(156): Wherein n may be a, c, g or t
  misc_feature (166)..(166): Wherein n may be a, c, g or t
  misc_feature (200)..(200): Wherein n may be a, c, g or t
tcgacttgcacgaactggctgatgaacttcactgtcgtcatgatctcgccacctgccttcgaacatttggagggtcacacattcactatgtttggcgctttcaacctgatctttatgccaattgtttacgtattctaccctgaaaccaagcgccgnggtcttgagnagatggatctgttctttgctgacgcgcacaaggnagggcttctggaaagctagtcgcttcc

SEQ ID NO: 8000 - protein, 72 aa, Homo sapiens
  misc_feature (56)..(56): Wherein Xaa may be any naturally occuring amino acid
  misc_feature (67)..(67): Wherein Xaa may be any naturally occuring amino acid
STCTNWLMNFTVVMISPPAFEHLEGHTFTMFGAFNLIFMPIVYVFYPETKRRGLEXMDLFFADAHKXGLLES

SEQ ID NO: 8001 - DNA, 278 bp, Homo sapiens
  misc_feature (1)..(1): Wherein n may be a, c, g or t
  misc_feature (2)..(2): Wherein n may be a, c, g or t
nntgttaaagaaggtttaaatcatattgttgtagatagtgtacaatttggtaatcaagaaatgattatggaaaaagatgttactgttgaaatgaaagatggcgaaaatttatatgtgaatattttccgtcctaacaaagaaggtcaattcccagtagtgatgtctgcagatacgtatggtaaagataacaaaccaaaaataactaatatgggtgctaattggccaacattaggcgctatacctacttcaagctttacgcctgaagaatcaccagatct

SEQ ID NO: 8002 - protein, 92 aa, Homo sapiens
  misc_feature (1)..(1): Wherein Xaa may be any naturally occuring amino acid
XVKEGLNHIVVDSVQFGNQEMIMEKDVTVEMKDGENLYVNIFRPNKEGQFPVVMSADTYGKDNKPKITNMGANWPTLGAIPTSSFTPEESPD

SEQ ID NO: 8003 - DNA, 345 bp, Homo sapiens
  misc_feature (1)..(1): Wherein n may be a, c, g or t
  misc_feature (220)..(220): Wherein n may be a, c, g or t
  misc_feature (250)..(250): Wherein n may be a, c, g or t
  misc_feature (251)..(251): Wherein n may be a, c, g or t
ngattaaacaaatcaaaagagctaaagaagtggaaagatatttcgttttggagggtaggaagacccaatagtgtcatgatgtcagttcttctcaagtttatctatagatttaatgaaatcacagtcaaaattccagcaagttattttgtagctattaacaaacttattctaaagtttacatatagaggccaaaggcacattttaagaaacacaatattanaaggaagactgatactacctgacctcatgnnacattataaagattctgtaatcaagacagtgtggtactggtgacagaatagataaatatatcaatttaacagaatggaaagcctagaaataagc

SEQ ID NO: 8004 - protein, 97 aa, Homo sapiens
  misc_feature (1)..(1): Wherein Xaa may be any naturally occuring amino acid
  misc_feature (74)..(74): Wherein Xaa may be any naturally occuring amino acid
  misc_feature (84)..(84): Wherein Xaa may be any naturally occuring amino acid
XLNKSKELKKWKDISFWRVGRPNSVMMSVLLKFIYRFNEITVKIPASYFVAINKLILKFTYRGQRHILRNTILXGRLILPDLMXHYKDSVIKTVWYW

SEQ ID NO: 8005 - DNA, 264 bp, Homo sapiens
cggtctctagcggcttcttacggagaagccaaaaggcagcgtttcctcagtgagctggcccagctggaggagaacgtacaattggcacggacacaagctcggaacaagctggacaagtacttcctggagcagacggtggcagacaatctggctttggagagaagctcatttgaagaccggctgagcagggcccctgagatcctggtgaggttaaggtcccacaccatctgggagcggatgtctgtgaggctctgtttcactgta

SEQ ID NO: 8006 - protein, 88 aa, Homo sapiens
RSLAASYGEAKRQRFLSELAQLEENVQLARTQARNKLDKYFLEQTVADNLALERSSFEDRLSRAPEILVRLRSHTIWERMSVRLCFTV

SEQ ID NO: 8007 - DNA, 259 bp, Homo sapiens
  misc_feature (1)..(1): Wherein n may be a, c, g or t
  misc_feature (2)..(2): Wherein n may be a, c, g or t
  misc_feature (3)..(3): Wherein n may be a, c, g or t
nnnggggccgatgattgtttcgatgttggggggggtaacaatcgtggaaatagtttatcgagacgtcatcaaaatttaaaaccgacaaatgcgacgttttggaaattcacgtggcacgaaatgggaaaatacgatttacccgctttgatagatttcattttggataaaacgcagcagaagagtttacattacatcggtcattctcagggcacgacacaatgtttcgttttccgggctttacattcggaatatcacaaaa

SEQ ID NO: 8008 - protein, 86 aa, Homo sapiens
  misc_feature (1)..(1): Wherein Xaa may be any naturally occuring amino acid
XGADDCFDVGGGNNRGNSLSRRHQNLKPTNATFWKFTWHEMGKYDLPALIDFILDKTQQKSLHYIGHSQGTTQCFVFRALHSEYHK

SEQ ID NO: 8009 - DNA, 426 bp, Homo sapiens
attgacgctctcgaggtgaggaccttgctgtcggggcaatacgacgagcgcgaggccgtcgtcacgattcgttcagaggctggcggtgttgacgctgccgattttgcggagatgctgctacgcatgtacctgcgttggtccgaacgtcacggctacaaggttgaaatcctcgacacttcgtacgctgaagaggcaggcattaagtcggcgacgttcgtcgttcatgcccccttcgcctacggcactctttcggtcgagcagggcacccaccgtctggtgcgcattagtcccttcgacaaccaggggcgccgtcagacatcctttgccggtgtcgaggtgttgcccgtcgttgaggagaccgaccacgtcgacatcccagagtccgatctgcgcgttgacgtcttccatgcctcgggccctggtggc

SEQ ID NO: 8010 - protein, 142 aa, Homo sapiens
IDALEVRTLLSGQYDEREAVVTIRSEAGGVDAADFAEMLLRMYLRWSERHGYKVEILDTSYAEEAGIKSATFVVHAPFAYGTLSVEQGTHRLVRISPFDNQGRRQTSFAGVEVLPVVEETDHVDIPESDLRVDVFHASGPGG

SEQ ID NO: 8011 - DNA, 384 bp, Homo sapiens
  misc_feature (1)..(1): Wherein n may be a, c, g or t
  misc_feature (36)..(36): Wherein n may be a, c, g or t
  misc_feature (135)..(135): Wherein n may be a, c, g or t
  misc_feature (205)..(205): Wherein n may be a, c, g or t
nacaatgagtatgtgctcatacaagaaaatgtgcanatcgatgccgataccagcgatatgcccatcaatgcttcaaactaccgctactggcgcgcacccatgcagcagtatatcgatgagttaattgctggcganacgggtgtccgtggtcgcgatttcaatacacgctgggtggcggccatggtcggtgatgtgcatcgtattntatgtcgtggtggtctcttcacttatccgttcgataccaaatacgccaataaagcgggcaaattacgcttgatgtatgaagccaatccaatgagcttattaattgagcgtgcgggtggcgctgctactgatgcagtcaatcgcatcttagatatagagccaaccgatattaaccaacgc

SEQ ID NO: 8012 - protein, 128 aa, Homo sapiens
  misc_feature (1)..(1): Wherein Xaa may be any naturally occuring amino acid
  misc_feature (12)..(12): Wherein Xaa may be any naturally occuring amino acid
  misc_feature (45)..(45): Wherein Xaa may be any naturally occuring amino acid
  misc_feature (69)..(69): Wherein Xaa may be any naturally occuring amino acid
XNEYVLIQENVXIDADTSDMPINASNYRYWRAPMQQYIDELIAGXTGVRGRDFNTRWVAAMVGDVHRIXCRGGLFTYPFDTKYANKAGKLRLMYEANPMSLLIERAGGAATDAVNRILDIEPTDINQR

SEQ ID NO: 8013 - DNA, 495 bp, Homo sapiens
agatctgtagactatagccttcagttcaaatccagctcactgtctgtttttgtaaataaagtttcattagaacacagcaagggcctgttcttttgcttttggacctacaccagcagagttgagtagttgcaacagagagcttaaagcctaaaatatttactgtctggccctttaaagaaaaatgttgctgaccccttgcctggtggataaggtaaatattaaattctcaaatatgtgaataaatatgtgatttccaatttttgtagggccagccgctttggaagaataaaaagggggagccttctttgagccggggcagtaagtgaacccttcttgagaaagtaggatttaagttgggccctgaagggcaaaaaaaaaaatagaggatatggatgtgaggattaaatatgcagagggatgacctgcatggaattctgcagaaggaaaagaacatggcatatctgaataaataaaggaaggccagtggagctgcag

SEQ ID NO: 8014 - protein, 75 aa, Homo sapiens
MFFSFCRIPCRSSLCIFNPHIHILYFFFCPSGPNLNPTFSRRVHLLPRLKEGSPFLFFQSGWPYKNWKSHIYSHI

SEQ ID NO: 8015 - DNA, 294 bp, Homo sapiens
acgcgtttgaagaagttagtagcaaaatggcgaagaaaacaaacacttgaaacaagtcaaaaaaaattgaaggcagactcaaaagcaaggataatattccaccaaatcagggacgaagcaatgagtgcgggtatcggagaatcacgtacagagttgcttacatggttgaatggcctccttaacttgaattacaaaaaaattgaggaatgtgggacgggagcagcatattgtcaaataatggattcaatttatggagacttgccgatgaacagggtaaaattcaatgccaggggg

SEQ ID NO: 8016 - protein, 58 aa, Homo sapiens
MSAGIGESRTELLTWLNGLLNLNYKKIEECGTGAAYCQIMDSIYGDLPMNRVKFNARG

SEQ ID NO: 8017 - DNA, 211 bp, Homo sapiens
  misc_feature (1)..(1): Wherein n may be a, c, g or t
  misc_feature (2)..(2): Wherein n may be a, c, g or t
  misc_feature (3)..(3): Wherein n may be a, c, g or t
nnntttttttttctcaacacaagtttaatcaatatcccaataagtttctttgcagaaataggaaacccaaccttaaaattcatatgggatttcaagggatcctggattaccaaaacaatcttgaaaagaaagaagaaaactgtaagattcacactgcctgatttaaaaacatactgcaaagctatagtaatcaaaacagtgtggtactagt

SEQ ID NO: 8018 - protein, 69 aa, Homo sapiens
  misc_feature (1)..(1): Wherein Xaa may be any naturally occuring amino acid
XFFFLNTSLINIPISFFAEIGNPTLKFIWDFKGSWITKTILKRKKKTVRFTLPDLKTYCKAIVIKTVWY

SEQ ID NO: 8019 - DNA, 252 bp, Homo sapiens
gccggcgcacacctcctccaccaaggcccaggcgcctgccaaggccacgccgcctctgcccccaccgggctcgggctccggaacgctgctcgagttcgcgggaggaaccagcttcggctccgatcctgccgcgttcgccgggccctccggcagctacgaggagagcatcctgtgaggtctatcgaagctcggcgtgtcctccagctctttggcgggctgaggattcccactcttgggtgctcgggtctctcc

SEQ ID NO: 8020 - protein, 84 aa, Homo sapiens
AGAHLLHQGPGACQGHAASAPTGLGLRNAARVRGRNQLRLRSCRVRRALRQLRGEHPVRSIEARRVLQLFGGLRIPTLGCSGLS

SEQ ID NO: 8021 - DNA, 311 bp, Homo sapiens
ggatccttttattatacatcattgagacagttattgaaacttacgtgcatagtgacaattgtgtgaaagtaatgcatcagtttaatgacctgattttcttcgttgtactgtagtctgtggaacatgtccttgtttataggaaatatacatagaagtttttggggataatgtagcatcagattggcatctatcgtttcaaatcgttcagaaaaacaacagcaacagttctttgtactatacgtgtagctttttcctatgtttgagattgttttttagaagttgtccagctggatgcagtggttcatgcctat

SEQ ID NO: 8022 - protein, 54 aa, Homo sapiens
MLHYPQKLLCIFPINKDMFHRLQYNEENQVIKLMHYFHTIVTMHVSFNNCLNDV

SEQ ID NO: 8023 - DNA, 326 bp, Homo sapiens
  misc_feature (326)..(326): Wherein n may be a, c, g or t
ggtacctgttggttgtctttggagtacataatcagatctcaagaatggtttggaagaaccagaagggcatttaaaaaacctaagaaaggcaaaagtgggcttcttgtgcccggtggattgcccctccatgagggcagggccttcagcactgggcacgtctgtgaggattctgggggctctgggatgctacacatcctgctgtgaggtgactgcctcatttcctccttatgtggccagctctgcagaaaagtgttcatgtctttttccacttaggaaacttcgtatcccatcatggtattcactgggactttccagacattgatcgn

SEQ ID NO: 8024 - protein, 72 aa, Homo sapiens
MNTFLQSWPHKEEMRQSPHSRMCSIPEPPESSQTCPVLKALPSWRGNPPGTRSPLLPFLGFLNALLVLPNHS

SEQ ID NO: 8025 - DNA, 255 bp, Homo sapiens
gatccgaacaaaccgaaacggcctgcgagtgcgttcttcgtgttcatggaggatttccgaaaacagtacaaagagaaacatccgaacaacaaatcggtttctgttgtcggtaaagctggcggtgagaaatggaaatcgatgtctgaatcggagaaagctccgtttgtagctaaagcagagaagaggaagtctgaatatgataaaactctccaggcttacaacaagaaactggctgaaggaaagcctgaagaagag

SEQ ID NO: 8026 - protein, 85 aa, Homo sapiens
DPNKPKRPASAFFVFMEDFRKQYKEKHPNNKSVSVVGKAGGEKWKSMSESEKAPFVAKAEKRKSEYDKTLQAYNKKLAEGKPEEE

SEQ ID NO: 8027 - DNA, 273 bp, Homo sapiens
ccggacgacgatgctctggcaacaagaaagacatcccagcaggtgctgacgaacatggtccaagttttgcctgaattgatcggtggttctgccgatttgacaccttcgaatctgacaaggtgggaaggcgcggtagatttccaacctcccattacccaactaggtaactatgcaggaaggtacattagatacggtgtgagggaacacggaatgggtgccattatgaacggtatctctgcctttggtgcaaactacaagccttacggtggtacc

SEQ ID NO: 8028 - protein, 91 aa, Homo sapiens
PDDDALATRKTSQQVLTNMVQVLPELIGGSADLTPSNLTRWEGAVDFQPPITQLGNYAGRYIRYGVREHGMGAIMNGISAFGANYKPYGGT

SEQ ID NO: 8029 - DNA, 309 bp, Homo sapiens
  misc_feature (1)..(1): Wherein n may be a, c, g or t
ncccggggctgtgccacccagccatgccaccacggcgctctgtgtgtgccccagggtccagatcccaacggcttccgctgctactgcgtgccgggtttccagggcccacgctgcgagctggacatcgatgagtgtgcatcccggccgtgccaccatggggccacctgccgcaacctggccgatcgctacgagtgccattgcccccttggctatgcaggcgtgacctgcgagacggaggtggacgagtgcgcctcagcgccctgcctgcacggggcctcgtgcctggacggcgtgggctccttccgctgt

SEQ ID NO: 8030 - protein, 103 aa, Homo sapiens
  misc_feature (1)..(1): Wherein Xaa may be any naturally occuring amino acid
XRGCATQPCHHGALCVPQGPDPNGFRCYCVPGFQGPRCELDIDECASRPCHHGATCRNLADRYECHCPLGYAGVTCETEVDECASAPCLHGASCLDGVGSFRC

SEQ ID NO: 8031 - DNA, 264 bp, Homo sapiens
acgcgtacggttgtatcgtttgtgggcaaacgacggccaacttttgcctgtcctggccatcaagggggagcgtgtttgcggcagcatcccgccggggcccgtttcgcgcagttgctggggccgggcgttttccatgtggatgtgcctcatgcagcgccggagctgggtgatgtgttaagtcatgaaggcccggtacagcaggccgaacaactggctgcaagggttttcggtgccgacgatacgtgggttgtgcttcatggcacg

SEQ ID NO: 8032 - protein, 88 aa, Homo sapiens
TRTVVSFVGKRRPTFACPGHQGGACLRQHPAGARFAQLLGPGVFHVDVPHAAPELGDVLSHEGPVQQAEQLAARVFGADDTWVVLHGT

SEQ ID NO: 8033 - DNA, 219 bp, Homo sapiens
  misc_feature (219)..(219): Wherein n may be a, c, g or t
gaaattcgtgacattttggtatctatgggacaaactgttcaagaatttgatttcgatgttgaggttggtcaaactgtacgtattattgatggtgcctttgcagattatactggtaagattacagaaattgataacaataaagtgaagatgattatctctatgtttggtaatgacacagttgcagaagtaaacctaaaccaaattgcagaattataaccn

SEQ ID NO: 8034 - protein, 71 aa, Homo sapiens
EIRDILVSMGQTVQEFDFDVEVGQTVRIIDGAFADYTGKITEIDNNKVKMIISMFGNDTVAEVNLNQIAEL

SEQ ID NO: 8035 - DNA, 342 bp, Homo sapiens
acgcgtcggatctggcaactgtccggtggtcagaaacagcgtgtcggcctggcccgtgccctggcggcggaccctcgggtgttgctgatggacgagcccttcggcgccctcgatgcctttacccgcgaacagatgcaggagctgttgctgcaagtctggcgccgcaccgccaagccggtgttcctgattacccacgatatagaagaggcggtttttctcgccaccgacctgattctgctggcgccgaatccggggcagatcgtcgaacgcctgagcctggatttcggccagcgctacagcgccggtgaatcggcccgggcgatcaagtccgaccctcgtttt

SEQ ID NO: 8036 - protein, 114 aa, Homo sapiens
TRRIWQLSGGQKQRVGLARALAADPRVLLMDEPFGALDAFTREQMQELLLQVWRRTAKPVFLITHDIEEAVFLATDLILLAPNPGQIVERLSLDFGQRYSAGESARAIKSDPRF

SEQ ID NO: 8037 - DNA, 315 bp, Homo sapiens
  misc_feature (1)..(1): Wherein n may be a, c, g or t
  misc_feature (2)..(2): Wherein n may be a, c, g or t
nngctagccgaaatgcaccaagatgtgccattactaatggctcacagtccagacgcggtgccttttgtgtgcgtacccggcacccgtgagtatcacgaacacccagcccacacgggcgatagctggttgctgcaccgtggtggcggcgaaggtacgcttcaccacctcctccaaactttggatcggtacggcgtcgaaccagtaagggataccagattggtttccacgtcagcggctacgcgacgcccattgtgcctgaatgagaaactatcttggtcttaaaaaaatcaacctgccacgacaggtcctacagga

SEQ ID NO: 8038 - protein, 93 aa, Homo sapiens
  misc_feature (1)..(1): Wherein Xaa may be any naturally occuring amino acid
XLAEMHQDVPLLMAHSPDAVPFVCVPGTREYHEHPAHTGDSWLLHRGGGEGTLHHLLQTLDRYGVEPVRDTRLVSTSAATRRPLCLNEKLSWS

SEQ ID NO: 8039 - DNA, 186 bp, Homo sapiens
  misc_feature (1)..(1): Wherein n may be a, c, g or t
ngtgcaccgaccaagaaaacctcgcttcacgatctctacgagctccaggccctctccccgtggtatgacaacctctgccgacctgtcaccgacttgctgccccttatcgccagcggtgttcgtggagtcaccagcaaccctgcaattttccagaaggccatctcatcctccagcgcatatgatgat

SEQ ID NO: 8040 - protein, 62 aa, Homo sapiens
  misc_feature (1)..(1): Wherein Xaa may be any naturally occuring amino acid
XAPTKKTSLHDLYELQALSPWYDNLCRPVTDLLPLIASGVRGVTSNPAIFQKAISSSSAYDD

SEQ ID NO: 8041 - DNA, 421 bp, Homo sapiens
tgtacagcacatactctcttcattaacggagtgacagtagtatacgatactttatcttgacctttctgaaatggcaagaatatgcatgactcacagtatataaattgttttttatttttttaaatttatttcatacacatttagttaaacttcccattaaatgctggaaactaggagggggggaaaataacctccatttttaagaagtcagtatattctatacacactcccatacacttcaattatgttctttgtcaaaatgctctttgaacaaaaaagcacacagacattcatgtgaaaacatgaacgactttagaatgtatacgtttatttgctctaaaatttgggttcctttggttttacaaagactgttatgtaattcagtagcactttgagaaatactagaccacctcgattccat

SEQ ID NO: 8042 - protein, 60 aa, Homo sapiens
MESRWSSISQSATELHNSLCKTKGTQILEQINVYILKSFMFSHECLCAFLFKEHFDKEHN

SEQ ID NO: 8043 - DNA, 333 bp, Homo sapiens
cttcgcactgctccgcgagttcttgggggagtgagcacagcgcgtaagctcagccacgtgtggttcgaattcgattccttggtcaatgcccgtgacgtgggcggaatccccacccccgatgggccggtgaaatcccagcgactgatccgcagcgacaacctgcaggccctcaccgaggccgacatcgcccagttgcagcaactcggtgtctccgatgtggtcgatctgcgttccacctatgaggtggccagcgagggcccggggccgctgaccgggcgtggggtgaccatccacccccattccttcctgcccgaccagcacgccaatgtgcac

SEQ ID NO: 8044 - protein, 111 aa, Homo sapiens
LRTAPRVLGGVSTARKLSHVWFEFDSLVNARDVGGIPTPDGPVKSQRLIRSDNLQALTEADIAQLQQLGVSDVVDLRSTYEVASEGPGPLTGRGVTIHPHSFLPDQHANVH

SEQ ID NO: 8045 - DNA, 311 bp, Homo sapiens
  misc_feature (43)..(43): Wherein n may be a, c, g or t
  misc_feature (44)..(44): Wherein n may be a, c, g or t
atctcaaaataaaatagtttaatcagagataaagaggcacatnnaattaaaattttgagttcaattaaccaagaaaacataaccaccctagaagtatatgtacctaatcatatattagcttcaaagtatttgaagcaaaaatctatagtaccaaaaagagaaacagacaaatccccaaatacggtgggagattttaacccatctttctcagtaactgacattaaaaaaatcaggacagaagaactgaataacactatcaatcaaacttacttgataagcctttatagaatattatatccaacaactgtaca

SEQ ID NO: 8046 - protein, 99 aa, Homo sapiens
  misc_feature (11)..(11): Wherein Xaa may be any naturally occuring amino acid
NSLIRDKEAHXIKILSSINQENITTLEVYVPNHILASKYLKQKSIVPKRETDKSPNTVGDFNPSFSVTDIKKIRTEELNNTINQTYLISLYRILYPTTV

SEQ ID NO: 8047 - DNA, 195 bp, Homo sapiens
gctgctggctgaatgttcgttgccgctgagttatgccgaagtcaacccggtggcattagagccggccatcgcgcctcacctggcggcgcgcgaagcgggcgttgcactgacggtgcaatcgctcttgaagccgatgcagcaaatactcgcccgggcaggcaaatttcaccctgattgaaagcgcggcgggcggcg

SEQ ID NO: 8048 - protein, 53 aa, Homo sapiens
MFVAAELCRSQPGGIRAGHRASPGGARSGRCTDGAIALEADAANTRPGRQISP

SEQ ID NO: 8049 - DNA, 303 bp, Homo sapiens
  misc_feature (1)..(1): Wherein n may be a, c, g or t
ngatgagtcccgagaagcccacggcactgcatgtctcatggggacctcagcaccccctttccaggagccctcaggccagcacccctcttaactgcgttgcaaccccgcaggtaggcagaaagggtggggctaggcagggaatgggccacagtcatgccaggaatgggccccgggccacttgcttctcggaagatccctgtgtgttgaaaatgagagaaatgtcacatcacgttagcccaggctgcggcattttcaaactgtttacactgagcccaggctgcaggattttcaaactgtttacac

SEQ ID NO: 8050 - protein, 100 aa, Homo sapiens [sequence omitted]

SEQ ID NO: 8051 - DNA, 303 bp, Homo sapiens
tctagagattttttcaagaaaataatcaagggccagcaatccatcacaaacgaagatttgaggactttccaactatccaaaaaatttgtcaaagaatacgaatccaagtattattctctgccaaggttgaaaatactggaaatcaaagctaataataaaagacaaagaacctttaatcgtcaacgccatcaccaaaagctcgtactaagaccgagtttattctgctgtttcggcataattaatgaacttaaactagaaaatgtaacgatagacaccgaatcgctagatactccaatggaattc

SEQ ID NO: 8052 - protein, 101 aa, Homo sapiens
SRDFFKKIIKGQQSITNEDLRTFQLSKKFVKEYESKYYSLPRLKILEIKANNKRQRTFNRQRHHQKLVLRPSLFCCFGIINELKLENVTIDTESLDTPMEF

SEQ ID NO: 8053 - DNA, 330 bp, Homo sapiens
agatctcattggtcgtttccagactgccgtccagcctggagggaagaaagcgacacagctcagcgtctccacacagggcagccctgcgggcagtacacactggctgccctgcggcaacagagccagcacaccactcaccacacaggacgccaggcattcatcacgccgtggcaactttaatctcgtctatctgcacacgtttttacatgaagagttttacatggaaagtctaaagagggagttatacctaacaagacaatatttcacttttacaatggaagaactaactaataacgaggattcactatttacaaaaaaagtcaggctaga

SEQ ID NO: 8054 - protein, 52 aa, Homo sapiens
MPGVLCGEWCAGSVAAGQPVCTARRAALCGDAELCRFLPSRLDGSLETTNEI

SEQ ID NO: 8055 - DNA, 278 bp, Homo sapiens
gccggccacccacaaggccctacttggcgtgggaactgctccaattctcggctgcctcctggacagagctcggatggcagaatgtgagccacagcagctcgtggcggtgagggatggtgcggagaaggcatccgacccccgcgctgagtctgccgggagctggacgtgagtccctcaaacagaggctcagggacggacgggcgctgctaccgagtggtcagggtgctctttttggccagtggacactgagggcacagaaacactcggtgcctgggaat

SEQ ID NO: 8056 - protein, 55 aa, Homo sapiens [sequence omitted]

SEQ ID NO: 8057 - DNA, 246 bp, Homo sapiens
ctcgagcacgacgacgccaaccgtgcgttgatgggttccaacatgcagcgtcaggctgtaccgaccctgcgtgccgacaagccgctggtaggtaccggcatggagcgcaacgttgcccgtgactccggcgtttgcgtcgtggctcgtcgtggtggcgtgatcgactccgtcgatgccagccgtatcgtggttcgtgttgccgatgacgaagttgaaaccggggaagccggtgtcgatcttttcaac

SEQ ID NO: 8058 - protein, 82 aa, Homo sapiens
LEHDDANRALMGSNMQRQAVPTLRADKPLVGTGMERNVARDSGVCVVARRGGVIDSVDASRIVVRVADDEVETGEAGVDLFN

SEQ ID NO: 8059 - DNA, 338 bp, Homo sapiens
acgcgtgagctgcgcaggcctttgatgccggtggacgtgagtgttgatctcgtatgctcgacggtcagctctgcaatgtgggtatgttcgcccaggtgataggcatggtggccggtcgaatcgagcacagtgagtgtgatgatcgtgatttcgtcgtcagttcccgctgggttgcgcgcctatcagccgtgttgtggtctgcacgttttcgcctaggttcgccagcgcctcaatgagtgcgtcgctggtggcgtgcagttcctcgtcggtaactggggcgagggcgtcgaggatgaacaacgccgtccgagtggtatcggtgaggccggtgcgtcgac

SEQ ID NO: 8060 - protein, 60 aa, Homo sapiens
MLDGQLCNVGMFAQVIGMVAGRIEHSECDDRDFVVSSRWVARLSAVLWSARFRLGSPAPQ

SEQ ID NO: 8061 - DNA, 336 bp, Homo sapiens
  misc_feature (1)..(1): Wherein n may be a, c, g or t
  misc_feature (2)..(2): Wherein n may be a, c, g or t
nncatccgattatctttcggccagaagctagagcagatactgcgcaagttccgtgagctgcatctgaagcggaatgaggctcgtaagttaaatcaccaggaagttgtgggagaagacaaaagacttaagctgcctgctaactgggaagccaagaaagcacgtctggagtgggaactccaggaagaagaaaagaagaaggagtgtgcagctcgaggggaagactacgagaaggtgaaactgcttgaagacagtgcggaggacgctgagaggtgggagaggaggaagaagaagaagaaccctgacttggggttttcagattatgctgctgcccaattg

SEQ ID NO: 8062 - protein, 112 aa, Homo sapiens
  misc_feature (1)..(1): Wherein Xaa may be any naturally occuring amino acid
XIRLSFGQKLEQILRKFRELHLKRNEARKLNHQEVVGEDKRLKLPANWEAKKARLEWELQEEEKKKECAARGEDYEKVKLLEDSAEDAERWERRKKKKNPDLGFSDYAAAQL

SEQ ID NO: 8063 - DNA, 423 bp, Homo sapiens
  misc_feature (1)..(1): Wherein n may be a, c, g or t
ngatgcttagtagataccaaggctttgttatctgcaataaatcaaggtcaaattaaaggtgcggcacttgatacttatgaatatgaggttggcgtatatacgacagatagaagtgaagacggtttgaatgacccacttttagaggaattaattactagagaagatattattgttacacctcacatagcattttatactgaagcggcaattaaacatctgatttttgatgctttagatgcaacaatggaagtattaaatactggcacgacacagttaagagtaaattaaaaagcataaagggtagcgagaagcattccctttatgctttttaacattagcgattatttaacatcataaccttgttcttcaattgcttctttcatattgtcaaatgtaacttttgaatcattatactcaacgcgt

SEQ ID NO: 8064 - protein, 95 aa, Homo sapiens
  misc_feature (1)..(1): Wherein Xaa may be any naturally occuring amino acid
XCLVDTKALLSAINQGQIKGAALDTYEYEVGVYTTDRSEDGLNDPLLEELITREDIIVTPHIAFYTEAAIKHLIFDALDATMEVLNTGTTQLRVN

SEQ ID NO: 8065 - DNA, 282 bp, Homo sapiens
ggcccgtggactgggaatgggaccttctggcttccagccgtgaagccttctcaggagggtgtctacctggctacggtacacctgccctacctgcaaggacaggtctccctggagctgactgtgcacaaggcccccagagtgtctctaacaccagcacccgttgtgtgggctgccccaggagaggcacccccagaactgctctgtcttgcatcccacttcttccctgcggagggtctggaggtcaagtgggagctcagaggcggcccaggaggaagttctaga

SEQ ID NO: 8066 - protein, 94 aa, Homo sapiens
GPWTGNGTFWLPAVKPSQEGVYLATVHLPYLQGQVSLELTVHKAPRVSLTPAPVVWAAPGEAPPELLCLASHFFPAEGLEVKWELRGGPGGSSR

SEQ ID NO: 8067 - DNA, 182 bp, Homo sapiens
agtctgtaagatgggcgcaacgccacctcctctgctgtttcccacaacgcacacagggatgcagagcggtctgctgtggctgtcgctccagctcccttggccccacagatgagggcagagaggcagcaatgagtcccaaattgggagaagaatgagcatgcttggaaaacagctttgtgcac

SEQ ID NO: 8068 - protein, 53 aa, Homo sapiens
MLILLPIWDSLLPLCPHLWGQGSWSDSHSRPLCIPVCVVGNSRGGGVAPILQT

SEQ ID NO: 8069 - DNA, 297 bp, Homo sapiens
tccggacaaaatagtcatcctctgtgagatagtccaagaattcttcatcctgggcattttctaggtctgggtctctgtatatgttttcatcaggcggtatgatgagaacctcatagccgttgctccttgccttgctctgggtgattttattgccatcgtgatccttcagcttttgcatatcacgcatcgctttacccagaagactcctcctcaactccatctgggcctcttgtcttttatggtttatctccagcattttcatcttatgtaaatactgtcttttcccagaagtgtaca

SEQ ID NO: 8070 - protein, 87 aa, Homo sapiens
MKMLEINHKRQEAQMELRRSLLGKAMRDMQKLKDHDGNKITQSKARSNGYEVLIIPPDENIYRDPDLENAQDEEFLDYLTEDDYFVR

SEQ ID NO: 8071 - DNA, 382 bp, Homo sapiens
cctaggttttagtttccctggctgatggttttttggggcattctttgctttgtaaagctactagataatattatcttggactataaaataatggcttgttgattctagagggagtaaaagctgaagtaaatactagatctcagcatctgtgaagaccgtagcttgctaaagtcagtgctattctaactactttaccttggccttgcaaagaatgaatgattagatagcgtttcacaggcacagtcctctggaagaggatttggttttttcgcctcacaataacacttaataaaccaccatccaacatcactatgtgatcagtcatcaggggactcccatccccaagtccccatcctgacttactgtaagcgccgagggagga

SEQ ID NO: 8072 - protein, 61 aa, Homo sapiens [sequence omitted]

SEQ ID NO: 8073 - DNA, 669 bp, Homo sapiens
ctagtggcatggtctcgctggtctttagtggagcataccgacacatcggtgactcaaacgatccgaatcatggctcgtcctggttggcctggaaccattaacgtacgcctcacccatcgcttaagcgacgccggtctagctgtcgaagtcaccgcgcgcaatgtcggtacgacagcggggccgcttggatacgcagcacacccctatctctgtctgggtggcaccatcgacgactggacagtcgacgccccgtttacctcgtggttacaggtcgatgatcggctgctaccaatgcagatgcgcgagatggacagcatccacgcgctgaacggtctcacgggcggacagcgcaccttcgataccgcttacaccgtgaaaggaggacggaaccgtcggatcgcccgcatggcgtatccgggtctcaacggtgaaacgagccacgaattgtggggcgacgccgcgatgagctgggtgcaagtctacactccagacgaccgccacagtctggccatcgagccaatgacctgcggcccagatgcatttaatgagggcccgacccacggtgacgtcattcgactggagcccggtaatgacgtcacactgcactggggcatcgcctaacccgcggaagctcgaaaggacaaggacgggaaggcaggattcacgcgt

SEQ ID NO: 8074 - protein, 206 aa, Homo sapiens
LVAWSRWSLVEHTDTSVTQTIRIMARPGWPGTINVRLTHRLSDAGLAVEVTARNVGTTAGPLGYAAHPYLCLGGTIDDWTVDAPFTSWLQVDDRLLPMQMREMDSIHALNGLTGGQRTFDTAYTVKGGRNRRIARMAYPGLNGETSHELWGDAAMSWVQVYTPDDRHSLAIEPMTCGPDAFNEGPTHGDVIRLEPGNDVTLHWGIA

SEQ ID NO: 8075 - DNA, 354 bp, Homo sapiens
ggcgccatgctcggcgggctggtgctgggtgtggccgaagcctttggcgccgatatcttcggcgaccagtacaaggacgtggtggcgtttggcctgttggttctggtgctgttgttccgtccgaccggcattctgggccgtccggaggttgagaaagtatgagcagatatcttaaatcggcgtttttcagcgccctgttggtgtgggccgtggcctttccggtactcggcctcaagctgagcattgtcgggatcaaccacgaagtgcatggcaccggtcccgtgaccttgaccatcatcgccctgtgctcggtgccgatgttcctgcgcgtgctgtttacccagcaagtcggtg

SEQ ID NO: 8076 - protein, 53 aa, Homo sapiens
GAMLGGLVLGVAEAFGADIFGDQYKDVVAFGLLVLVLLFRPTGILGRPEVEKV

SEQ ID NO: 8077 - DNA, 364 bp, Homo sapiens
gtcgacgacgtgcgcttcatcgtggtcaccgacggcgagcgcatcctgggcctcggcgatctcggcgtgaacggcatgggcatcccgatcggcaagctggcgctctacaccgcctgcgccggtgtgccgccggagctgtgcctgccggtcacgctcgatgtcggcaccaacaacgccgaatatctcgacgatccgctgtatctcggcgagcgtcacgagcgggtgcgcgggacggactatcacgacttcatcgaggaattcgtgagcgcgacgctcgatcggtttccgctggcctgcatccagtgggaggatttcgccaatttcaacgcggtgccgatcctggcgaagtatcgtgacctgatca

SEQ ID NO: 8078 - protein, 121 aa, Homo sapiens
VDDVRFIVVTDGERILGLGDLGVNGMGIPIGKLALYTACAGVPPELCLPVTLDVGTNNAEYLDDPLYLGERHERVRGTDYHDFIEEFVSATLDRFPLACIQWEDFANFNAVPILAKYRDLI

SEQ ID NO: 8079 - DNA, 189 bp, Homo sapiens
atctgcatcgagagcggggacaaggcggtgcagacggaccaggccgcgcacatggtgtacctccacgccggcgacaaccccttcgacaccgtcaccgccgccgtcaaggcggtggagaagcacctgcagacgttccaccaccgcgacaagaagaagctgccgtcgttcctcgactggttcggctggtgc

SEQ ID NO: 8080 - protein, 63 aa, Homo sapiens
ICIESGDKAVQTDQAAHMVYLHAGDNPFDTVTAAVKAVEKHLQTFHHRDKKKLPSFLDWFGWC

SEQ ID NO: 8081 - DNA, 332 bp, Homo sapiens
  misc_feature (332)..(332): Wherein n may be a, c, g or t
gcgtgcaactgctcgccccgtatttccaggaaggccgcctgctcaatgtggcgcaccaataccagttgaacactgactggcacactcgcacccctaccggcttctgaggagaacactatgcatggggaagtcgggatcgggctggagattcatacccagctcgtcacccaatcgaagattttctccggtagcgccaccacgttcggctccgagcccaacacgcaggccagcctggtagacctgggcatgcccggcgtgctgccggtgctgaaccaggaagcggtgcgcatggcggtgatgttcggcctcgccatcgatgccgagatcggccn

SEQ ID NO: 8082 - protein, 71 aa, Homo sapiens
MHGEVGIGLEIHTQLVTQSKIFSGSATTFGSEPNTQASLVDLGMPGVLPVLNQEAVRMAVMFGLAIDAEIG

SEQ ID NO: 8083 - DNA, 391 bp, Homo sapiens
  misc_feature (1)..(1): Wherein n may be a, c, g or t
ngatggtgttgcagagaactttaaagttacagtagtccaggtgagagattattgtaatctgaaccatggcagtggaggtggaaaggtaggatagatttaagaaatatctagaagtagcattaacaggaatttaggattgattgtgtgattggagagtgtgaccagagagtgcacagtataggatggtactgtctggtggagcagtaagtatgagtgacttgagtcaaagttgttgaatttgggaattgattaatggctgcgtcattggtattacctgtagcccataacgatggaggaactttgtgaatcaagagccaaactatataacgaatgtggagctgtgattggtcattgataggggattggtaaatgacatccatgaggaaagctt

SEQ ID NO: 8084 - protein, 86 aa, Homo sapiens
MDVIYQSPINDQSQLHIRYIVWLLIHKVPPSLWATGNTNDAAINQFPNSTTLTQVTHTYCSTRQYHPILCTLWSHSPITQSILNSC

SEQ ID NO: 8085 - DNA, 333 bp, Homo sapiens
acgcgtttagtccctttcataaagaccggaggaacagacgtttacggccagctcccgaaaccaagtgaactggaggccaccctgcaccaagggttggaaccttttcacaaaatccacgctcctaatacaaggcaactctgaaccagtgcaatggcagacagggatgccaccctgtgggcttctcctgagaagatgttgtcgcagcccctcaaggacagtgatgccgaggtttacagcatcattaaaaaggagagcaaccggcagagggtcggattagagctgattgccacggagaattttgccagccgagctgtgttggaggccctgggatcc

SEQ ID NO: 8086 - protein, 61 aa, Homo sapiens
MADRDATLWASPEKMLSQPLKDSDAEVYSIIKKESNRQRVGLELIATENFASRAVLEALGS

SEQ ID NO: 8087 - DNA, 354 bp, Homo sapiens
  misc_feature (1)..(1): Wherein n may be a, c, g or t
  misc_feature (2)..(2): Wherein n may be a, c, g or t
nntgttcatttacctggtgttggtgaaaactttgaagaccacttagaagtgtatattcaacatgaatgtaaagagcctgtgtcattacaacctagtttagatgttaaacgcatgccatttatcggtttacaatggattttcgcacgtaaaggtgctgcagcttctaaccacttcgagggtggcggtttcgtacgttcaaataatgaagtagattatcctaacttaatgttccccttcttcccaattgcagtacgttacgatggtcaaaaagcacctgtcgcacatggttaccaagttcacgttggaccaatgtattctaattcacgcggtagcttaaaaattaaatctaaagat

SEQ ID NO: 8088 - protein, 118 aa, Homo sapiens
  misc_feature (1)..(1): Wherein Xaa may be any naturally occuring amino acid
XVHLPGVGENFEDHLEVYIQHECKEPVSLQPSLDVKRMPFIGLQWIFARKGAAASNHFEGGGFVRSNNEVDYPNLMFPFFPIAVRYDGQKAPVAHGYQVHVGPMYSNSRGSLKIKSKD

SEQ ID NO: 8089 - DNA, 425 bp, Homo sapiens
  misc_feature (1)..(1): Wherein n may be a, c, g or t
nggaaaatgcaagcttccggtcctaaagcctcctgttctcaagggcagtcactgtggttgcctggctgctgtgtgacggtgaccacggcccaggctggagctcccaggagaggccacagagtcctgttggggcctagagggcagggagcatccatcgcttacctcttgaccaccaaggagagcctatcttggttggagcaggagatggagggaggttagcattcatgttcatcaagtagaagccccagccgtggtgcctggcagggcctctgacagcccagggtgccacgggctcacccctcactcagtgcctggcactcagtagaggttccacctttcacttcaggaaataggtccaccatctgtccgctcaccccggcttccagtcactgtggacggccacctccattggtgccgccatgaat

SEQ ID NO: 8090 - protein, 70 aa, Homo sapiens [sequence omitted]

SEQ ID NO: 8091 - DNA, 397 bp, Homo sapiens
gctagccagcttgaggtattaaaggtgggataataaaatagaaatgaagcttggcaaaggatcaaaaatcaatttatctgtctatctatctatcatccatccatctatccagtccagtgcggtcagccatccagtgtgtcgtcgatgcggtccatccagtccatccatcaacttattgtataacctggtaattttaaacataatataatgccgaaagtgaaaaactttttcctgaaggataaaagttcgcatcagctggttacaggcaggagttcctgtttgggcccctggactcagcttcaccacttttctgcctgttacacttgttactttcagtccccctgtgtgtggggtatgctttctgagaagagccaggattctaggggaggagctttgg

SEQ ID NO: 8092 - protein, 63 aa, Homo sapiens
MPKVKNFFLKDKSSHQLVTGRSSCLGPWTQLHHFSACYTCYFQSPCVWGMLSEKSQDSRGGAL

SEQ ID NO: 8093 - DNA, 293 bp, Homo sapiens
gccggctccctgcggatgcccgggtcggagaggggcgcccgggaggggcgggtctactggcacgtggaggggccggcccgggttcgcggttccccgtgcccaggcaggaggggctgcagacgcctgagctccgtaggggttggggctgggggctgcggagctgtctacatcggactcctccgggtcagcccgttaggagccgcctcccctctgcccctccgaagagacgagcggcccagacaggcctgggaaggcccctctgccccgtcaggggtgaaaagaaagtggaagga

SEQ ID NO: 8094 - protein, 92 aa, Homo sapiens [sequence omitted]

SEQ ID NO: 8095 - DNA, 451 bp, Homo sapiens
  misc_feature (396)..(396): Wherein n may be a, c, g or t
  misc_feature (441)..(441): Wherein n may be a, c, g or t
  misc_feature (442)..(442): Wherein n may be a, c, g or t
tgatcatgataagtccatgtcctacctaacaggctcatgcccttggacacagctcactgttaaactatcaaacaccacgtaaaagcatgaacatgcagagcagaccgtttgtgctctaggctggtgcctctgagtgtgggttcaaccagtgcttctcaaccattttcattactgtactcaccctgaggatatttttataacatagatatattgtatatctatttattgtatatcttttatatataggtatgtatatctgtgctttatacatttaaatagggtttttaaaatttatgtatttatgtatttatttatttatttttgccttctaagaaccaatgtttacctcctgcagggagatactgcctccactgacaaatgggttatgtaatgaanagaaaacaccctcacagtctaaatggaaacttttcagctgggaannttaaaaagg

SEQ ID NO: 8096 - protein, 51 aa, Homo sapiens [sequence omitted]

SEQ ID NO: 8097 - DNA, 396 bp, Homo sapiens
acgcgtttctcttcctcttcgcgtgttctgaataaagccaagtggcaatgtctcttccaccatataacatgaagctttagcaagcttttagctctagacatagttgacatatcagacctacagaaacataggaatcggtaaatgacaaagaaatcatttgtgagcagtcctattgttagggactcgacattgctggtaccaaagtcattaatagcaaagccgtacgtattaccgtttttcccgttatacgctacctttgcccaactatatttccagcaatatgatcgttacatcaaaggacctgagtggacttttgtctacttggggacattggtatccttgaacatcctagtcatgttaatgcctgcttggaatgtcaagatcaaggcgaaattt

SEQ ID NO: 8098 - protein, 85 aa, Homo sapiens
MTKKSFVSSPIVRDSTLLVPKSLIAKPYVLPFFPLYATFAQLYFQQYDRYIKGPEWTFVYLGTLVSLNILVMLMPAWNVKIKAKF

SEQ ID NO: 8099 - DNA, 314 bp, Homo sapiens
  misc_feature (1)..(1): Wherein n may be a, c, g or t
nctggtgcccagagcctcgtcggggtccagccccagggcctttgcgagtcagacacttggggcccttgcttgtggtttttctgggagctttgggccgagggttccccggacccttccctgaacttttccgcagtttcagaggagagtctgcaagtgagagctgcagtgactgtgccttgtgcttggcacccaagcagggcatgggagtcttaagtggaaccagggcctcaaggacaacagagagccgcatggcagggtagacacctggataaaagtgggtgggggaagcccactgctgcaccccgggcattgct

SEQ ID NO: 8100 - protein, 103 aa, Homo sapiens
MPGVQQWASPTHFYPGVYPAMRLSVVLEALVPLKTPMPCLGAKHKAQSLQLSLADSPLKLRKSSGKGPGNPRPKAPRKTTSKGPKCLTRKGPGAGPRRGSGHQ

SEQ ID NO: 8101 - DNA, 348 bp, Homo sapiens
  misc_feature (28)..(28): Wherein n may be a, c, g or t
  misc_feature (70)..(70): Wherein n may be a, c, g or t
ccacacccacacccacacccacacacancaccacacccacacacccacacacccacaccacacccacacnaccacacccacacaccacacccacaccacctcactagcatattgatatggcgtacgcacacgtatgctaaagtatatattacttcactccattgcgccccatgacccagtcctcatttccatcaatagtaactgagttcggatcactacacacggaaatggcctcactggtttttacccttgccatttacctataatcctcatgattatccatacattaatgtctatagttgattatagatcctcaatgatcataaaaataatttttagtttacgcgt

SEQ ID NO: 8102 - protein, 57 aa, Homo sapiens
  misc_feature (10)..(10): Wherein Xaa may be any naturally occuring amino acid
  misc_feature (24)..(24): Wherein Xaa may be any naturally occuring amino acid
PHPHPHPHTXPHPHTHTPTPHPHXHTHTPHPHHLTSILIWRTHTYAKVYITSLHCAP

SEQ ID NO: 8103 - DNA, 276 bp, Homo sapiens
gtgcacttccccgcactgatgccgcgcgaggcatacgaagcgaccgggcggtgggaggagtacggtgacctgctgttccgcctgcaggaccgcaaggcggcacactacctgctcgccccgacgcacgaagaggccttcacgctgctcgtgaaggatctgtactcgtcgtacaaggacctgccgctcacgatctaccagatccaggacaagtaccgcgacgaggctcgaccccgcgccgggctcctccgcgggcgcgagttcacgatgaaggacgcg

SEQ ID NO: 8104 - protein, 92 aa, Homo sapiens
VHFPALMPREAYEATGRWEEYGDLLFRLQDRKAAHYLLAPTHEEAFTLLVKDLYSSYKDLPLTIYQIQDKYRDEARPRAGLLRGREFTMKDA

SEQ ID NO: 8105 - DNA, 396 bp, Homo sapiens
agatctttcagactctaaggcctgacacagctatctctaatggattctgattgttttcacacaattttcttagaatatcctgttaccttcaccttagataaaagacacatacacatacaggattgcagggggtcatccagaggggaaaaggataggaatcctatccctttgcagtgccctggcatcttaagggaaatggcatctctcctaaagaagtaattaggctaaattctctctagctattagcaaagtgatttcaaatggatgtctcccccaaaaggtggcctgctctgattactgcataatcaatttaataggaacagagtccatttatagagaaggtaagacttagagataggcatctcatttataagggcagatgagcacagctgtaca

SEQ ID NO: 8106 - protein, 59 aa, Homo sapiens
MDSDCFHTIFLEYPVTFTLDKRHIHIQDCRGSSRGEKDRNPIPLQCPGILREMASLLKK

SEQ ID NO: 8107 - DNA, 468 bp, Homo sapiens
  misc_feature (349)..(349): Wherein n may be a, c, g or t
  misc_feature (382)..(382): Wherein n may be a, c, g or t
agatcttgtcttgggtgtcttgggactgtacccatcgtcccaacctgagcccaacttgatggaagctagaaaagtcatgccatccttttttgtgtaattctttcttggtggggaaattctgaggtaacattttatgcctgctaatagagccaaaaaaaagtgtaaagcccattgttagtagaacggtggggaaacagcattgcttacatatctctagcactataaatgttgttacaggacaaactaataaaatataaacagtgattaagttttcatatacttaggcccaggaattccatatattgaaatagggcactttcctatgcattcactggatggagagaaattnttaaataaaggcctcaatgaaataagtcaccanattagaaagtaattgatagaaacatgtattcttaatgctgccatttatagttctaaggatggggaaccaccccaatacccaaaata

SEQ ID NO: 8108 - protein, 57 aa, Homo sapiens
MGFTLFFGSISRHKMLPQNFPTKKELHKKGWHDFSSFHQVGLRLGRWVQSQDTQDKI

SEQ ID NO: 8109 - DNA, 297 bp, Homo sapiens
  misc_feature (1)..(1): Wherein n may be a, c, g or t
ngtgcacattgtcatgatgatcttggaatggcagttgctaatagtttagcagctattgaaggtggagctagacgtattgaaggtacagtgaacggtattggtgaaagagcaggaaatgccgcacttgaagaagttgctttagctttatatgtaaggaaggaccactatggtcttgaatctcaaattaaccttaaagaaactaagaaaacatctgacttaatttcaagatatgctggtatccgtgtacctagaaataaagctatagtaggtcaaaatgcatttagtcatgaatccgga

SEQ ID NO: 8110 - protein, 99 aa, Homo sapiens
  misc_feature (1)..(1): Wherein Xaa may be any naturally occuring amino acid
XAHCHDDLGMAVANSLAAIEGGARRIEGTVNGIGERAGNAALEEVALALYVRKDHYGLESQINLKETKKTSDLISRYAGIRVPRNKAIVGQNAFSHESG

SEQ ID NO: 8111 - DNA, 333 bp, Homo sapiens
  misc_feature (37)..(37): Wherein n may be a, c, g or t
  misc_feature (38)..(38): Wherein n may be a, c, g or t
  misc_feature (127)..(127): Wherein n may be a, c, g or t
  misc_feature (268)..(268): Wherein n may be a, c, g or t
  misc_feature (333)..(333): Wherein n may be a, c, g or t
tgctcgtgtgtgatggtatgtatatgtgtatatgtgnntatatgtatatacgtgtgttatggtgtgtatatatgtatatacgtgtgtgtatatatatgtatatgggtatgtgtgtgcatgtgcgtantggtgtgtgtatatgtgtatatatgtaggtgtgtatatctgtgtataatggggtgtgtatatgtgtgtatggttttatatgtgtgtaaatatataacctgtgtatatatgggatgtgtgtgtatatgtgtgtatatatggnggtgtgtatgtccatgtatgaatgtgtatatatgtgtgtatatatgtaggtgtgtatatgtgtgn

SEQ ID NO: 8112 - protein, 111 aa, Homo sapiens
  misc_feature (13)..(13): Wherein Xaa may be any naturally occuring amino acid
  misc_feature (43)..(43): Wherein Xaa may be any naturally occuring amino acid
  misc_feature (90)..(90): Wherein Xaa may be any naturally occuring amino acid
  misc_feature (111)..(111): Wherein Xaa may be any naturally occuring amino acid
CSCVMVCICVYVXICIYVCYGVYICIYVCVYICIWVCVCMCVXVCVYVYICRCVYLCIMGCVYVCMVLYVCKYITCVYMGCVCICVYIWXCVCPCMNVYICVYICRCVYVX

SEQ ID NO: 8113 - DNA, 318 bp, Homo sapiens
  misc_feature (1)..(1): Wherein n may be a, c, g or t
  misc_feature (2)..(2): Wherein n may be a, c, g or t
nntctagaacagtattcagacggtaatatttacatagaaggggaaatgctcggctacaacgatgataccgacatacgtaagctaagctcaaccaaagagctcaatcatgtcagacgtaacatggggatggtgtttcagcagtttaacctatggcctcacatgacagcactgggcaatgtaacagaggccttagtaagagtgaaaaaactaagtcgggcagcagccaatgaaaaaggcttagcgattttggctaaagttggcttatctgaacgcgcatcacactaccctgttcaactatcaggcggacaacaacaacgc

SEQ ID NO: 8114 - protein, 106 aa, Homo sapiens
  misc_feature (1)..(1): Wherein Xaa may be any naturally occuring amino acid
XLEQYSDGNIYIEGEMLGYNDDTDIRKLSSTKELNHVRRNMGMVFQQFNLWPHMTALGNVTEALVRVKKLSRAAANEKGLAILAKVGLSERASHYPVQLSGGQQQR

SEQ ID NO: 8115 - DNA, 246 bp, Homo sapiens
gatgacagacatgttatgacacatccagtccgtgtctgtgctactgtatcagtctttctaaggaagtgatgcttaccgtccacagtgctggggcgggactagcctgaggaggggctgctgtggtcctgtctgcagatcaggaggacaggctgaaggacggagcctccacccaaccgaggttacaaatgccaactgggaggcattttcttctgtgacaaaatgtctcattaggaaagcctggagaat

SEQ ID NO: 8116 - protein, 51 aa, Homo sapiens
MRHFVTEENASQLAFVTSVGWRLRPSACPPDLQTGPQQPLLRLVPPQHCGR

SEQ ID NO: 8117 - DNA, 338 bp, Homo sapiens
  misc_feature (1)..(1): Wherein n may be a, c, g or t
  misc_feature (13)..(13): Wherein n may be a, c, g or t
naccgtaattctngagatccccgacacgagtacagaacgaggaagtacatgcgtcacaccttgcgagagacgtggtctggactacgccgcaacgcagcgatgaccctggccgtcgtcgtcaccatgtgggtgtccctgtccctattcggggcggctctgttggccacccaacaggtcgatctgctcaagggcaagtggtacgacaaggtcgaggtatcggtctttctgtgcgtcgatggtgttcctggggcccaatgctcaggcgagaaagctgccacccaggcccaaaaggacgccatccgtgaggcattggagtcaaacccgcaagtttcccgcgg

SEQ ID NO: 8118 - protein, 112 aa, Homo sapiens
  misc_feature (1)..(1): Wherein Xaa may be any naturally occuring amino acid
  misc_feature (5)..(5): Wherein Xaa may be any naturally occuring amino acid
XRNSXDPRHEYRTRKYMRHTLRETWSGLRRNAAMTLAVVVTMWVSLSLFGAALLATQQVDLLKGKWYDKVEVSVFLCVDGVPGAQCSGEKAATQAQKDAIREALESNPQVSR

SEQ ID NO: 8119 - DNA, 270 bp, Homo sapiens
acgcgtagtagggagcagcaaattcttcgagccagaacccggtcttgcggccggtgttgccaagctggtcgtgagaagtcaaaaccatcaatactttcatgtgccagtgcctcggggtgatgtggggtggaatggagtgaagcttaggagccgggccaacaccgcacaatgtcatgtccgcaaggattccggacattgtgccaagccggttgccgtttaccggttacacgccgacaatcaccgctccgcgccccttggagagatgagatg

SEQ ID NO: 8120 - protein, 65 aa, Homo sapiens
MSGILADMTLCGVGPAPKLHSIPPHITPRHWHMKVLMVLTSHDQLGNTGRKTGFWLEEFAAPYYA

SEQ ID NO: 8121 - DNA, 349 bp, Homo sapiens
  misc_feature (342)..(342): Wherein n may be a, c, g or t
  misc_feature (344)..(344): Wherein n may be a, c, g or t
  misc_feature (345)..(345): Wherein n may be a, c, g or t
  misc_feature (346)..(346): Wherein n may be a, c, g or t
  misc_feature (347)..(347): Wherein n may be a, c, g or t
  misc_feature (349)..(349): Wherein n may be a, c, g or t
tcatgattccacttttttggtttcagttacccatggtcaaccatggtgtaaaagtattacagacagtaatatattttgagacagtgagagtccatatgcatatagcttttattatagcttattgttatcattggtctattttattatttattgcccttaatcttttattatgcctaattcctaagttaaactttattatggatttgtaggtattgggactaacataatatgcatctgtgtttttagggatgcactgggggtcttgaaatttatccttttagaagaaagagggactactgtgctaagttacattcccaccaatagtgttcacatccccccccncnnnncn

SEQ ID NO: 8122 - protein, 68 aa, Homo sapiens [sequence omitted]

SEQ ID NO: 8123 - DNA, 369 bp, Homo sapiens
  misc_feature (262)..(262): Wherein n may be a, c, g or t
actagtgtcattttctttgaactctggcatggattctgtggctttatgcaaatcatcattttgctttttagtttgaaacaagtagcaatataatcagttgataatcatcaaccttactcacagaattacggtatagggtatccaagaatgtcaaattactttaaaatggttgtacacataagaaataattgtgtactccccccaactcacttatttattaatttgcaagttattactcttgcattctttaagaatgaagttngtgcaatgactaatttacacaattttctatttaaatgcatgaaattaatgaacataaaatgagaaaataattaatgctaataatttagttacagttttcttaaattt

SEQ ID NO: 8124 - protein, 58 aa, Homo sapiens
  misc_feature (39)..(39): Wherein Xaa may be any naturally occuring amino acid
MSNYFKMVVHIRNNCVLPPTHLFINLQVITLAFFKNEVXAMTNLHNFLFKCMKLMNIK

SEQ ID NO: 8125 - DNA, 341 bp, Homo sapiens
taaaatcctacagaaatactcttagacaattcttctactccaataaaaagcgaccgtgaatcgacgcctccaatctcaccaaagggctctggaagtacaaaaccaagcatcggtagcagtaccgtcgtggaaagtaataccaagaaaaataattatgatgaaaaaatccatttattgcaaaaaactgctcagcagaagaactgctcgattatgtaactacaaccgtaccattaagtgtataagtttcccaggttatattatatattctttagatcactgcctgttctttattacccgcgagctaatctttgtcttatataggcgcgtcagcggagacgcgt

SEQ ID NO: 8126 - protein, 70 aa, Homo sapiens
NPTEILLDNSSTPIKSDRESTPPISPKGSGSTKPSIGSSTVVESNTKKNNYDEKIHLLQKTAQQKNCSIM

SEQ ID NO: 8127 - DNA, 346 bp, Homo sapiens
  misc_feature (1)..(1): Wherein n may be a, c, g or t
  misc_feature (2)..(2): Wherein n may be a, c, g or t
nntccggatcggatcgacccacgctggtcggccctcgagggcctcgtcggcggggatgactcggatcggtcctgaacgtcgccataggcaaccgccgcgtgcggatgctgacccttcaagcacaccaaggagaaaatcgtggccgtcccgaagcggaagatgtcccgcagcaatacccggcaccgtcgttcgcagtggaagacggttgctaccaagctcgtcacctgcgccaacccggcctgcggtgagaagcacctgccccacaccgcctgcccgtcttgcggtgggtacgggccgcgcggcgaccgtcgtcaggttgtcgaggcctgagatcgacactgtgcac

SEQ ID NO: 8128 - protein, 63 aa, Homo sapiens
VAVPKRKMSRSNTRHRRSQWKTVATKLVTCANPACGEKHLPHTACPSCGGYGPRGDRRQVVEA

SEQ ID NO: 8129 - DNA, 382 bp, Homo sapiens
ccatggaagtctaaatcacataaggcccagggggagaaacctcccctgtaatctcagaagtctcttaccatgacttgaaaaccttattctatgtggcagatttcaatggacctgaatagaatcaaagacacccttaaaggacctgcctgtctaagaacccctgtggcactcggggcatctgcatcccttatgcccaccagcccatgtgccagggaccacaggcagctaatgggggtttctcatgtagtttcagaaactggaagactgctgcttttgagagaatatcactggtcagactctaaccaggtccctaaccaggcgttgccatcttcacccagtatttctaaagcgtcctgtgagcaatgaggaatgcaacactggt

SEQ ID NO: 8130 - protein, 91 aa, Homo sapiens
MWQISMDLNRIKDTLKGPACLRTPVALGASASLMPTSPCARDHRQLMGVSHVVSETGRLLLLREYHWSDSNQVPNQALPSSPSISKASCEQ

SEQ ID NO: 8131 - DNA, 327 bp, Homo sapiens
acccgcctcagtggcgaggacatggacccggcccagctgcaggaatcgctgcgcaatgcatcgcgcatgatcgccgacggaaccggcccgcaggccgacaatttcagccagttccagccactgaccgacgacaaggggcagatcaccgcgctgcgctttgttttcccgccgtaccaggtgggtccatactcggacggcacccagaccgccgatgtaccggcagcggtgctgttgccgcacgtggccaaggactacgtggagctgttcgcacgcggttgaccgcagtcgaggaggtggcgtggatacagggttgcagggacgggtcgc

SEQ ID NO: 8132 - protein, 85 aa, Homo sapiens
MDPAQLQESLRNASRMIADGTGPQADNFSQFQPLTDDKGQITALRFVFPPYQVGPYSDGTQTADVPAAVLLPHVAKDYVELFARG

SEQ ID NO: 8133 - DNA, 337 bp, Homo sapiens
  misc_feature (1)..(1): Wherein n may be a, c, g or t
nccgcttcggcctcggcaacccggcacctgcaaacgctttgggggccattgtggcgccctaccacccatatcgaacgccagcgcgagcgcctatggctggacgacggcgactttctcgacctcgactggcatggcccccatgacgcgcaagcgccgttggtgctggtgctgcatgggctgacggggtcgtccaattcgccctacgtggccggcctgcaaaaagcccctcgctcccaaggctgggccagcgcagcgttgaactggcgcgggtgctcgggcgaacccaacctcttggcgcgcagctatcactcgggcgccagcgaggacctggcggccg

SEQ ID NO: 8134 - protein, 112 aa, Homo sapiens
  misc_feature (1)..(1): Wherein Xaa may be any naturally occuring amino acid
XASASATRHLQTLWGPLWRPTTHIERQRERLWLDDGDFLDLDWHGPHDAQAPLVLVLHGLTGSSNSPYVAGLQKAPRSQGWASAALNWRGCSGEPNLLARSYHSGASEDLAA

SEQ ID NO: 8135 - DNA, 416 bp, Homo sapiens
aaattttaagttctgggtgttcatgttattttaccagtttggcatttggaactcggagcacatgctgtggctggtagtaaaagccaagtttgccatgcctatagtctgtatatagaatgtcagctaaatgcttactgcactggtaccatagctactttgggaccgagtatatgactaagccaaaatcacttttatcattttgtgccaagatacactgtcggtgcctgatccggaatggtctgtgtttgggtgcctgctcttacgccactggtgcagtgacgtgtaagacgtctaagtcctgttccgtatgaagcgtgactcggcgtgtagactagtcatgtgcatagctctgtttacatcccgcaccacccactcttccctcacgcaggcaaacgtcggaaccgtgtgcagctagc

SEQ ID NO: 8136 - protein, 64 aa, Homo sapiens
MSAKCLLHWYHSYFGTEYMTKPKSLLSFCAKIHCRCLIRNGLCLGACSYATGAVTCKTSKSCSV

SEQ ID NO: 8137 - DNA, 413 bp, Homo sapiens
gatctgatcgcaggaattgatgaatttctggatgaggtcatcgtccttcctcctggagaatgggacccaaatatccggattgagccccccaagaaggtgccctctgctgacaagaggaaatctgtgttctccctagcagagctgggccagatgaatggctctgtgggaggaggcggcggagctcctggaggaggcaatggaggtggtggtggtggtggcagtggcggcggggctggcagtggcggggccggcggaacaagcagcggggatgatggagagatgccagccatgcatgaaatcggggaggaacttatctggacaggaaggtgcccaccccaggcctcccagtgaccctgctgtcctttagacttctcccttctcagctgccctctagggacttttcccaaccatgg

SEQ ID NO: 8138 - protein, 116 aa, Homo sapiens
DLIAGIDEFLDEVIVLPPGEWDPNIRIEPPKKVPSADKRKSVFSLAELGQMNGSVGGGGGAPGGGNGGGGGGGSGGGAGSGGAGGTSSGDDGEMPAMHEIGEELIWTGRCPPQASQ

SEQ ID NO: 8139 - DNA, 463 bp, Homo sapiens
  misc_feature (444)..(444): Wherein n may be a, c, g or t
  misc_feature (461)..(461): Wherein n may be a, c, g or t
accggttacagaagggctcagaaagtaaagtgctttatgcccaaggaagtgaaagatccagagactttggctgtcaaacatttatgtatagaaaggactcctttcatggggaaacttaaccaatttcgtgggttaatactgcctttggtttctcaattagtactctccttgtcctcagatttgttctcagaaaataaaggtggaaagtctttttgttggcctctataaatgattgaataattagctcatagctagagagggtattagctcttgttattggctgagggccagaaggatgggctggggtaatagaagcattgcttcctgcagggaagggagcgcatgacccagccacagtcttgagtctctggagacttcatacaactaagggtcatatgggtggtatttaatacaatggtatatttcattcaacgccactgattntttttctcccttgctangg

SEQ ID NO: 8140 - protein, 63 aa, Homo sapiens
MPKEVKDPETLAVKHLCIERTPFMGKLNQFRGLILPLVSQLVLSLSSDLFSENKGGKSFCWPL

SEQ ID NO: 8141 - DNA, 297 bp, Homo sapiens
aaatttattgatgataaaataaatcaattaatgaatgaagattgtaaacttaacttcttaggagacctatccgctttaccgacagcaactcgtaaagctatagaaaaaggagtggaaaaaacaaaaaataataaatcttgtttggtaaatatttctgtaaattatggtggtagggatgaaatagtccatgctgtaaaagatattatagaggctggctatgataaaaatatgatagatgagaaattaatttcagaccatttatacactaaaggtattccagatcctgatttgcttatt

SEQ ID NO: 8142 - protein, 99 aa, Homo sapiens
KFIDDKINQLMNEDCKLNFLGDLSALPTATRKAIEKGVEKTKNNKSCLVNISVNYGGRDEIVHAVKDIIEAGYDKNMIDEKLISDHLYTKGIPDPDLLI

SEQ ID NO: 8143 - DNA, 296 bp, Homo sapiens
  misc_feature (74)..(74): Wherein n may be a, c, g or t
  misc_feature (296)..(296): Wherein n may be a, c, g or t
tgatcaacttatactgatccatgccaattcattcagtacccatcataccaatcacatgtaaatgtttgtaggtntaaaccagctacctttagtcaggaaactttcatttggttaccctgatactcacgccttcatttccttcacagaattatcaatctactataaagtacttggatatatactaacgtactctgcaaacaaagcagaatataattatatactgacttgtgacttgcttctagtaggtgtgaagtataattaaaattcatcagacttcagacatacaatttctgtan

SEQ ID NO: 8144 - protein, 66 aa, Homo sapiens
  misc_feature (5)..(5): Wherein Xaa may be any naturally occuring amino acid
MFVGXNQLPLVRKLSFGYPDTHAFISFTELSIYYKVLGYILTYSANKAEYNYILTCDLLLVGVKYN

SEQ ID NO: 8145 - DNA, 403 bp, Homo sapiens
  misc_feature (1)..(1): Wherein n may be a, c, g or t
nccaagtgacctatcaaaaatacctacaaaaagtataattaaggtaccaaggtccagtaagcacttcctcttttgacctcttccagaatttcttgactctgttttttttttttttttggaaacaggccccacggtgttgccccattcggggttttaaggggttattccaaaaaaacaaccagaagccacaaaaccccaaaaccccaaaacccctgggttcccatgttcccccccaccccaccctccccaagaagcggggaaaaaaggaaaaagcaacggcacccattaaatcccattaaattttccaataaatcatttactgttttgaagtgtcatcccggaaacggcaatccaacctttaaaattccaatttccccaacaaaaaagaaagcggcggatggga

SEQ ID NO: 8146 - protein, 90 aa, Homo sapiens
MGAVAFSFFPRFLGRVGWGGTWEPRGFGVLGFCGFWLFFWNNPLKPRMGQHRGACFQKKKKNRVKKFWKRSKEEVLTGPWYLNYTFCRYF

SEQ ID NO: 8147 - DNA, 304 bp, Homo sapiens
aagcttggatgcgaactgctgctcaagccgcttcggtgacggcagcccgtgcctgaaggacgaccgcggtctcaatgaccgcaacgactaccagcaggacgacgggccacaccagcgaccactgaagggattcggaaactccacgctcccggcactgtcgatgctccgatcgaccccgactcatttcggcaagtttgacgacacatagcccttgatcacggtaacaaccaccgtcgctatcgagaccgcccccactaacaagatggcgttttcggttgactggctgagtcctctctcgtcgcga

SEQ ID NO: 8148 - protein, 53 aa, Homo sapiens
MSRGRSEHRQCRERGVSESLQWSLVWPVVLLVVVAVIETAVVLQARAAVTEAA

SEQ ID NO: 8149 - DNA, 241 bp, Homo sapiens
agatctgctctctcattcccatgcttcaaacatttcatggcctacaaaataacacccaagctccctcaggaaaatcacccaaatgacccagaacctacatccagtctatctttctcgtgtcatctcctaccactcttctccttacccacccttcttcacaagcaccctcagtcacacagaacttctcaccaatttcctgaatccagtatatactttggtgcccctctaccttagttcatga

SEQ ID NO: 8150 - protein, 65 aa, Homo sapiens [sequence omitted]

SEQ ID NO: 8151 - DNA, 381 bp, Homo sapiens
  misc_feature (1)..(1): Wherein n may be a, c, g or t
nattttggaattacgaaccattttattatcgaaatatggtgaggtgtgaggacttgcagcggtgcgtgctcccgatgtcaaactcggtggtttcctggccgatggtgcaagactggaaccatgatcgttgccttcagtcttgttcccagtggtggccgagcttcgcgggaggacggtggcgttgccgacgccgttgctgctgccgtcaaggtggttcgcgattctgggctgcccaaccacacctcgtcgatgttcactgaaatcgagggctcgtgggatgaggtcatggatgtcgttaagcgggctaccgaagcggttgcgcagtatggcactcgggtgtcgcttgtactcaaagccgatattcgtcccgggtgtaccggt

SEQ ID NO: 8152 - protein, 87 aa, Homo sapiens
MIVAFSLVPSGGRASREDGGVADAVAAAVKVVRDSGLPNHTSSMFTEIEGSWDEVMDVVKRATEAVAQYGTRVSLVLKADIRPGCTG

SEQ ID NO: 8153 - DNA, 336 bp, Homo sapiens
  misc_feature (253)..(253): Wherein n may be a, c, g or t
  misc_feature (254)..(254): Wherein n may be a, c, g or t
gatctctacaatgaaaattataaaacactgatgaaaccaatcaaatatgacacgaacaaatgggaaaacatttcatgctcaaggatagaaagaatcaatgttcttacaatgaccacactgcccaaaacaattcacagattcaacactattctcaccaaactaaaaatgacattcttgacataattgaaaaaaaattaaaaattcatatggaacaaaaaaagagccagaatagctaaagaaatcctgagcaaannaaacaaagctgaaggcactgcattacccgacttcaaactataccaaaaggttatagcaacctaaacaacatgacacttgtac

SEQ ID NO: 8154 - protein, 60 aa, Homo sapiens
DLYNENYKTLMKPIKYDTNKWENISCSRIERINVLTMTTLPKTIHRFNTILTKLKMTFLT

SEQ ID NO: 8155 - DNA, 432 bp, Homo sapiens
gatccttctgggcgctggtccaagcgcgtggtgaggccgtcctctcctgcagaaccccggcctcttcgcccctgcccgctcacctgttctgtcctgctcacctcctccaggaagcctgcctggccttctccatgctgatgggcgtggcccttgtccctgcagccatgcattgacctccgtggctcctggaggccaggccacgtcctcatcccctctgggtgagtgagaggcacagcctgggtgcgtggggccgtggcggctccgaggcgccaccgctgtgtcctctcatgagtgggtgccgtccaggtctgtcctgggctggctgcgaggaggaggttggcctcgcgcggccatgtgcgtgacagtggagacatcgccagcctcctgcttgcacagctgacggcagcccctctctctccagccatgtcccca

SEQ ID NO: 8156 - protein, 141 aa, Homo sapiens
MAGERGAAVSCASRRLAMSPLSRTWPREANLLLAASPGQTWTAPTHERTQRWRLGAATAPRTQAVPLTHPEGMRTWPGLQEPRRSMHGCRDKGHAHQHGEGQAGFLEEVSRTEQVSGQGRRGRGSAGEDGLTTRLDQRPEG

SEQ ID NO: 8157 - DNA, 265 bp, Homo sapiens
acgcgtcccggggctccctggaggcacgagccccagctgctcatgggggcacatgctcctggggcaccctgcattctctccttgccatccctcgctcacatccctactggggcttcctgggacccctcccaaatgaactccttgcactcagatccttgtttcaggctctgcttcttggggagccacactcatttggggagccaagttatttatttgtctgtaatggggagtccagtctggaaggggcttcagccatctccagcca

SEQ ID NO: 8158 - protein, 74 aa, Homo sapiens [sequence omitted]

SEQ ID NO: 8159 - DNA, 225 bp, Homo sapiens
cagggccttctgtccactgccttgactttctccagccctgccactaaccaggccatcaccattccagtcaccgtggcctttgtgttggatcgtcgtgggcctggtccctatggagccagcctcctgtcacgcttcctggactcctatcaagtcatgttcttcacctattttgctctgctggctgggacagcagtcaccattatagcctaccatacagtctgtgca

SEQ ID NO: 8160 - protein, 75 aa, Homo sapiens
QGLLSTALTFSSPATNQAITIPVTVAFVLDRRGPGPYGASLLSRFLDSYQVMFFTYFALLAGTAVTIIAYHTVCA

SEQ ID NO: 8161 - DNA, 531 bp, Homo sapiens
ggatcccctcaacacagccagctcctctttctccactacatcactctcatgtgcaaagaagccactgggtaacaagtggcacatggcctttaagaatggcaatgacagctgggcacggtgacatgtgcctgcagacccagctgcttgggagggagggctagacaggaggatcgccggagcccaagagttcagggccaatttgggcaacataatgaggctctaaaagcaaacaaacaaacaaaaaaggcaatggtcatatgacaattcaggatctcagaagaatgaagccaaggtcagaatctcatcttgacaaccccagtgtcaaagaaaaccaatcggagtggccaccagcaagaggaaagggcaggtgttgaaaagaagcagcagaagcctccaagcaaggcgcccgctcatggtgaagcactgcaataccctacatccaaggcaaccgtgacaccgcatgcataacggaaccaggacaacaaagagccgcaggtgtggggacgtgcccaggttccgttatgcacgcgt

SEQ ID NO: 8162 - protein, 70 aa, Homo sapiens
MLPKLALNSWAPAILLSSPPSQAAGSAGTCHRAQLSLPFLKAMCHLLPSGFFAHESDVVEKEELAVLRGS

SEQ ID NO: 8163 - DNA, 411 bp, Homo sapiens
  misc_feature (355)..(355): Wherein n may be a, c, g or t
gcgatcctgatgaaaaaggccgaccaggctaaagtcgacctgcctcacgacgccgcgttcttcatcgcccagcgcattcgttccaacgtgcgtgagctggaaggcgcactcaagcgggtcatcgctcactcgcacttcatgggccgcgacatcaccatcgagttgattcgcgaatccctgaaagacctgttggcgttgcaagacaggcaaaagaaaatgaataacatccagcgcactgtggccgagtactacaagatcaagatttccgacctgctgtccaaaggccgttcgcgctcggtagcacgtccccgtcaggtagcgatggcgctctccaaagagctgaccaaccacagcntgccggaaattggtgatgtgtttggcggtcgcgaccacaccacggtcttgcacgcg

SEQ ID NO: 8164 - protein, 137 aa, Homo sapiens
  misc_feature (119)..(119): Wherein Xaa may be any naturally occuring amino acid
AILMKKADQAKVDLPHDAAFFIAQRIRSNVRELEGALKRVIAHSHFMGRDITIELIRESLKDLLALQDRQKKMNNIQRTVAEYYKIKISDLLSKGRSRSVARPRQVAMALSKELTNHSXPEIGDVFGGRDHTTVLHA

SEQ ID NO: 8165 - DNA, 348 bp, Homo sapiens
  misc_feature (348)..(348): Wherein n may be a, c, g or t
accggtatgcctgatcggggggctatcagctggacggaagttggccatcagatcgcgactatggagccccatcgcccacctggccaatactgcctccctgctactgccagtctccaatctcaccaacttgctgacggtagcggcgatgaccaaaactcaccttcgaacgatttcaccgccatcacggctataccctggctactgtcaatcaacaacctacccgcagtattggtactgatccccttcgttttctctgcgggttgggtggcagttttgaccatgcttatcggagtcaatatcgggccgaacctcagctgtgctggattattggcgactttgttatggcgn

SEQ ID NO: 8166 - protein, 116 aa, Homo sapiens
TGMPDRGAISWTEVGHQIATMEPHRPPGQYCLPATASLQSHQLADGSGDDQNSPSNDFTAITAIPWLLSINNLPAVLVLIPFVFSAGWVAVLTMLIGVNIGPNLSCAGLLATLLWR

SEQ ID NO: 8167 - DNA, 188 bp, Homo sapiens
  misc_feature (1)..(1): Wherein n may be a, c, g or t
ncgcactccccatgtgttggagtcccactggggtgggcaactgggattccattacacccatttcaatgaaggtgttattaatagctctgggcactggacagacgggggaccccaagacacggggaaggaaagcaggctgtggcatcccaaccctgtacactccctcactacaccacctaagctgggcg

SEQ ID NO: 8168 - protein, 59 aa, Homo sapiens [sequence omitted]

SEQ ID NO: 8169 - DNA, 443 bp, Homo sapiens
acgcgtcaaagccctgcatgaaggcgcgccggttgagaatggaggtcaggtaatccgtctctgccagctcgcgaaactcactttctaccagcaacaccgagcgcaggttcttcaaataggaaaaactcaggataaaaccgatggccaccgacgcgacgcaaaaaatatacagatagacctgggcatcgccgtaaatgtccgcctggatgcacggccataaaatcaaccagaccaacgtggcgcagaccagataatcctgcacactgataaacaggatggcgctgctgatcaccaggataaccgccagcggcaagccaaacaggcgcaactctccatgcgcgctgatgacataggcaaaccccacggacagtagcacgacatacacaacccctagcgcacgccacaggtaaaagtggggggtcatatggtgcagtcgattcgga

SEQ ID NO: 8170 - protein, 141 aa, Homo sapiens
MTPHFYLWRALGVVYVVLLSVGFAYVISAHGELRLFGLPLAVILVISSAILFISVQDYLVCATLVWLILWPCIQADIYGDAQVYLYIFCVASVAIGFILSFSYLKNLRSVLLVESEFRELAETDYLTSILNRRAFMQGFDA

SEQ ID NO: 8171 - DNA, 225 bp, Homo sapiens
  misc_feature (1)..(1): Wherein n may be a, c, g or t
nggtaccagatcccccgcggtttcttgttcaacatcgtgacctgcgccaattacaccaccgagatctaccagtgggtcggcttcaacatcgccacacagaccgtggcaggttacgtcttccttgtcgtggcggcgggcatcatgaccaactgggcgctcagcaagcacagccgtctgaagaagctgtttgacggaaaggatgggaggaaaaagtaaataggaggg

SEQ ID NO: 8172 - protein, 71 aa, Homo sapiens
  misc_feature (1)..(1): Wherein Xaa may be any naturally occuring amino acid
XYQIPRGFLFNIVTCANYTTEIYQWVGFNIATQTVAGYVFLVVAAGIMTNWALSKHSRLKKLFDGKDGRKK

SEQ ID NO: 8173 - DNA, 307 bp, Homo sapiens
  misc_feature (1)..(1): Wherein n may be a, c, g or t
  misc_feature (2)..(2): Wherein n may be a, c, g or t
nnccaggccgaagtgctgacctattacatcgacagcttccgtggcagcaacattgccaaccgcgacctcaagaccatcagttcctacccgcgcagctactacaccttcggcatcgagccgcggatctcccatgtgttcgacgtgggcccgagcacccaggaagtcagcgtcggttatcgctacctcaaagaaggcatgcatgaacaggccagcagcctcaatctggtcaacaacgtgccgacgccgggtgggcaaaatgacgggcatgtttaccaggatcgcactggcggcactgtcgccaacgcgt

SEQ ID NO: 8174 - protein, 102 aa, Homo sapiens
  misc_feature (1)..(1): Wherein Xaa may be any naturally occuring amino acid
XQAEVLTYYIDSFRGSNIANRDLKTISSYPRSYYTFGIEPRISHVFDVGPSTQEVSVGYRYLKEGMHEQASSLNLVNNVPTPGGQNDGHVYQDRTGGTVANA

SEQ ID NO: 8175 - DNA, 500 bp, Homo sapiens
ggatccaaaagacttctgtgaaaagagtagcagccagcacattgttctcctttgcacctgtcccaattgccaactctcattctgtcacagaatgtaccagacactctttactgtccttcctccaagagaataagataaagccaagagcagctgactagttagtatataaagctgtagtagtatttgaaatattatataagggctgttttctgaggtgaacagttcagtcattgaagaaatctttttattgagctcctgcccaagcgccatgctgaggagacagcttctcctcccaaggagcttacaatctagtgggggatcaaatccagagtgatgggggcagttacttggtgggggcacacaggacactatgaaagcaagtagaggacccggcctgtgtttggttgtttagttcctcatctctgcttggaatgttgacatgtcgtttttcagacaacacatatgtgggtgtacttgggagcaaaagctccaaaagcatt

SEQ ID NO: 8176 - protein, 61 aa, Homo sapiens
MALGQELNKKISSMTELFTSENSPYIIFQILLQLYILTSQLLLALSYSLGGRTVKSVWYIL

SEQ ID NO: 8177 - DNA, 294 bp, Homo sapiens
tccggaagcctaggatgaacatggctataattcaagaagcaaattactgaggcttccctctttctttgagtcaggtttcaaagacatgggagatgggggagaaggatgaggaagaggatcaaagggttttttttgttttggtgctgtgttctctgagcttggtgggttgaatgatgaagtggtgatatagtttggatatttgttctctccaaatctcatattgaaattgatctccagtgttagagttggggcctggtgggagacgtttgagtcaggaaggtggattcctcatga

SEQ ID NO: 8178 - protein, 64 aa, Homo sapiens
MRFGENKYPNYITTSSFNPPSSENTAPKQKKPFDPLPHPSPPSPMSLKPDSKKEGSLSNLLLEL

SEQ ID NO: 8179 - DNA, 362 bp, Homo sapiens
  misc_feature (1)..(1): Wherein n may be a, c, g or t
nctcatctttagaacttttatatggagactgctctcctcctccacagggtgcccctaggaattgagcaagacatcagctttatctgtgcgcttcctctttagcccaatatactcccagctagcaggctgaaggagagccccatttctttggagtctcaagagagatctcaggctgagtaaaagatggagaggaacaagggaagtagttgttttacctccctccccagcacgttctccaaaagtggtgcctttccaaccatgttgaaggtgatatatattgacaagatatttggaaagacatctatgattaaaaaataaaaaccaggctgggtatgatgggtcatgcctataataaccccagc

SEQ ID NO: 8180 - protein, 58 aa, Homo sapiens [sequence omitted]

SEQ ID NO: 8181 - DNA, 568 bp, Homo sapiens
ggcgtttcccttataatcccccgagaagcccgtacgaagattttttagataaagaaaccgcataaaaaaaaggggagatatgcgaaaacaaaaccgatggtttgaaacggagggacctggggccaggagggacgctgagtggagcggaaccccggggtgcgggagaggtgcccgggctggattgtgggatcgcgcggcggataacagcgcgtccagacacctggcgtgggtcttggacggcggtcgcccaggagtggtgcgctccccgggcagtggacgcgtcgtttgcccgaccgagccaggtcctccgtgcgctgacctcttcctctgagcttataggcatccacaggtcggaactctggtagagaggccctgttggagctcgggagagggccgggtgtcccacgtggtccccggcgacttgggcgcgcctcacacagtgcgcagagttggaccttcagtcaggctccacgttgttggctaagacagaactcccggcatgagcgtgcgcgaaggaagttacacgtcaagtcaaagtgggtactggaggccgggtgcggtggctcac

SEQ ID NO: 8182 - protein, 110 aa, Homo sapiens
MPISSEEEVSARRTWLGRANDASTARGAHHSWATAVQDPRQVSGRAVIRRAIPQSSPGTSPAPRGSAPLSVPPGPRSLRFKPSVLFSHISPFFYAVSLSKKSSYGLLGGL

SEQ ID NO: 8183 - DNA, 236 bp, Homo sapiens
  misc_feature (1)..(1): Wherein n may be a, c, g or t
ntgcttgggttggacgacccagaaatgctggagctgatgcggctctatgtaacaattcacactgatcatgaaggcgggaatgtcagtgctcatactggtcatctggttgggagtgctctgtcagatccttatctttctttcgcagcggctctaaatgggctagctgggccactgcatggccttgcaaatcaggaagtgcttttatggatcaaatctgtaattggaggaaactggga

SEQ ID NO: 8184 - protein, 78 aa, Homo sapiens
  misc_feature (1)..(1): Wherein Xaa may be any naturally occuring amino acid
XLGLDDPEMLELMRLYVTIHTDHEGGNVSAHTGHLVGSALSDPYLSFAAALNGLAGPLHGLANQEVLLWIKSVIGGNW

SEQ ID NO: 8185 - DNA, 315 bp, Homo sapiens
tcacctagaaacacaaactgtccctagtacaccttccatgggcatgaaagctagcccaactagcttcaacacaactcagtcacctcatggatgaagtggaaataaagcctgcctattaaacaagaatgttgtgaagatttttagagaattatgtaaaagctccccctccacccaatttaggcaactaactcccacccactgataccttttaaattggagtgtaaatgttttcagattacttaattctaaccagaggttaaacatttttgggtcttgggtaacttggagaatctgattaaagctatggaaaaaata

SEQ ID NO: 8186 - protein, 59 aa, Homo sapiens [sequence omitted]

SEQ ID NO: 8187 - DNA, 445 bp, Homo sapiens
agatctagaaaagtaaattggcaaattccagagtgtttgcaaaactattattatattacagaaagtatatttgtatttttacaacttgaaccagtttgcccaaattgtttaaaagtgaaggatgccaccaagggatgcattatttacaggagttgtgaaggcattaggaaaacaggcttgctttaaagcacagctttacggctgtacaaacagtgttctctcttgaaaatggaaattgttattaaatctaccacttttttaccttttgccttgttaaaaagcttttttgaaagggagaagggattcttttcccctttattggaaccgttgcttttctttgttccagcttccggccaaatggaggaaataataagggattcagcaccgcccaattatttttccaaattgttttttttatctccccttggactttgattaaaccctc

SEQ ID NO: 8188 - protein, 68 aa, Homo sapiens
MEIVIKSTTFLPFALLKSFFEREKGFFSPLLEPLLFFVPASGQMEEIIRDSAPPNYFSKLFFLSPLGL

SEQ ID NO: 8189 - DNA, 188 bp, Homo sapiens
gggccctattctccctgctgccttgggcttggagatgctcacaggtgagttctcatttgtgaagaggtctgtcttcctgaggaagcaggggaccctcacctgtgaaccaagtgtgccatgggagctgctccatgtccaggtccaggtctcctggtctgcagggaacggcacaagagggctggcctagg

SEQ ID NO: 8190 - protein, 50 aa, Homo sapiens
MLTGEFSFVKRSVFLRKQGTLTCEPSVPWELLHVQVQVSWSAGNGTRGLA

SEQ ID NO: 8191 - DNA, 493 bp, Homo sapiens
acgcgtgagccaccgcacccggccataaaggatcatttaaattgtagtttggactttatcttgagggcaataaggaactattaaaatgttttacaacatgaaaagatttgtgcagatctgtgtttgagaaaaagtatgcagctacagtacagagaatgaaacagaaaatcagctgcagtaatccaggaaatggtttatagtagtctgacctattacagcagcagtgaaggcagagaaaatgggtgaggaaggctcagagagttaggtggaatcaaaaagccttgtaagtgatttgactgggagtagacagaaagagaaaggaattaaagatgacacctctgtttctggctgggataaagggcaggtgaagggggacagcagattttgggagggtaaaataattactttaattctgggcagactgagtctgaggtgcattaaagttattcaaatgaaggtacccaataggctgtcggatatacaaaatcttaag

SEQ ID NO: 8192 - protein, 58 aa, Homo sapiens [sequence omitted]

SEQ ID NO: 8193 - DNA, 302 bp, Homo sapiens
tgatcactctatgtaaaatagcaaccccactctccagaaatttctatcccccatcttcatgttaaagtttttccacagcactggacattatataatagactattttttttttgtttattgccttttacattccattaaaatataatctcaggcgggcagtttttaaggttctattcataactgtaaccccagcatgtggaacagtgtttaacaaatagtaggcgctcagtaaatatttattgaataaatgagtgaatgactgtatgaaaacccttgtcttttgtcccatgcaattcactagt

SEQ ID NO: 8194 - protein, 54 aa, Homo sapiens [sequence omitted]

SEQ ID NO: 8195 - DNA, 582 bp, Homo sapiens
  misc_feature (1)..(1): Wherein n may be a, c, g or t
  misc_feature (2)..(2): Wherein n may be a, c, g or t
nngaattcaggaaaaactaaaagccatttccaattagatcctgaaagccagtgttcctttggatcctttgtttccttcaggcctgaccaaggcatcaccctcgggagcccacagagacacgacgccagggctcctccaccactagcctgcggccccagtgaatctaccctaaaagaaggaatcccaggtcccagaaatctggatcttcctggtttgtgggacgtccccgcctgggagagcacccagcacccttggcctgtctgcggggaaagctgttgggagaacaaccacttagtaatgcaccagagaggccactcaaaggaccggacacgtagggcctgggagaaattcaacaagagggcggagacgcagatgccgtggagcagccctcgggtacagaggcacttccggtgtggcgtgtgcggtaagagcttccgccggaagctgtgtctgctgcgccatctggcggcccacacggggaggggccccttccggaacgctgacggtgaaatgtgcttccgacacgagctgacccatcccagccaccgcctcccgcagcagggggagaagcctgcccagtgc

SEQ ID NO: 8196 - protein, 194 aa, Homo sapiens
  misc_feature (1)..(1): Wherein Xaa may be any naturally occuring amino acid
XNSGKTKSHFQLDPESQCSFGSFVSFRPDQGITLGSPQRHDARAPPPLACGPSESTLKEGIPGPRNLDLPGLWDVPAWESTQHPWPVCGESCWENNHLVMHQRGHSKDRTRRAWEKFNKRAETQMPWSSPRVQRHFRCGVCGKSFRRKLCLLRHLAAHTGRGPFRNADGEMCFRHELTHPSHRLPQQGEKPAQC

SEQ ID NO: 8197 - DNA, 291 bp, Homo sapiens
  misc_feature (1)..(1): Wherein n may be a, c, g or t
ntgcttgctgctgtgtccgctggaacgtgggtatgggatgattataccaattctccgtggacgcgagatggtcgtgttcgagctgatattattacagtggcgcctgatgtgtctggctggtcgacgggattggttgtacataacgaccaattggttgagaaaggtcaattgttgtttcgagtggaccagcagcgttatcgtgcggcgttagctaaaagccaagcaacagtagaaaatgaaaaatatacttgggcattggcaaagcataaatacgagcgtcgaaagaagctt

SEQ ID NO: 8198 - protein, 97 aa, Homo sapiens
  misc_feature (1)..(1): Wherein Xaa may be any naturally occuring amino acid
XLAAVSAGTWVWDDYTNSPWTRDGRVRADIITVAPDVSGWSTGLVVHNDQLVEKGQLLFRVDQQRYRAALAKSQATVENEKYTWALAKHKYERRKKL

SEQ ID NO: 8199 - DNA, 217 bp, Homo sapiens
aaatttagcggccctggcagggaatgaggtagacaggggagtctttgattctttgagttcatctaacatgcatgaagcttttggcaagatttggacgactggaccagagctgcctgccatcagagctaccctccaaacactgtccttacctggcctcctcctagcccatcccacgacagtgatcacagtctgcatcctagcctctccctagactagt

SEQ ID NO: 8200 - protein, 65 aa, Homo sapiens
MQTVITVVGWARRRPGKDSVWRVALMAGSSGPVVQILPKASCMLDELKESKTPLSTSFPARAAKF

SEQ ID NO: 8201 - DNA, 211 bp, Homo sapiens
acgcgttggttcagcaatggtcgagggggctctgggggccggtgcggtggcgctggcattgggcgtctctgtggccacgtttggctgcggcgcattcatcctgtgcggccttgtagccggggtgatcggcggggcgaccggctggagcgattacaaggaaaagaagatacaggagatgaccgaggacattggtgaactggatatcaccggt

SEQ ID NO: 8202 - protein, 65 aa, Homo sapiens
MVEGALGAGAVALALGVSVATFGCGAFILCGLVAGVIGGATGWSDYKEKKIQEMTEDIGELDITG

SEQ ID NO: 8203 - DNA, 434 bp, Homo sapiens
  misc_feature (232)..(232): Wherein n may be a, c, g or t
  misc_feature (290)..(290): Wherein n may be a, c, g or t
  misc_feature (306)..(306): Wherein n may be a, c, g or t
  misc_feature (353)..(353): Wherein n may be a, c, g or t
  misc_feature (354)..(354): Wherein n may be a, c, g or t
  misc_feature (363)..(363): Wherein n may be a, c, g or t
  misc_feature (366)..(366): Wherein n may be a, c, g or t
  misc_feature (421)..(421): Wherein n may be a, c, g or t
agatctccagggagaagcaggcacaggcctcctccctgcatccctgtgccaagtgccaggcaccatcagccacatccctgcccaggcaaacaaactggcaagccccagagcagaggtagcaccctgggcaccagggcaggtccccagaaggaggagatggcagacttgatcacagagccttacagcagctgcctgctgagcacggcttgtgcctgatctccagcacctctgnctttgcaagctcaggatccattctcccaccccgaccatcagccgtgcctgaacacagncactcctgaacacagncgctgtggcccagggcactcagctcactgggacccccgcggtccctnngtcacgcangcngctctggccggcaaatcgcagccacctgctgccgcacaccctgtgacccgcttangaaagctcgggtg

SEQ ID NO: 8204 - protein, 90 aa, Homo sapiens
  misc_feature (13)..(13): Wherein Xaa may be any naturally occuring amino acid
MVGVGEWILSLQXQRCWRSGTSRAQQAAAVRLCDQVCHLLLLGTCPGAQGATSALGLASLFAWAGMWLMVPGTWHRDAGRRPVPASPWRS

SEQ ID NO: 8205 - DNA, 316 bp, Homo sapiens
tctagactatttgggggaaaaaaattgaataacctatttcaaaatactagcacagtaaatgaatcttgaggaagaaattctctgtttttggaggattgaggggtcacccaatgtgtattctgtgttcccttcacactcagaatcccccccaaccccctcagctggagggcttctctcagccaacccggattcccagtattcttcacgttgggtggcagcttgcttcttctatcgagcaaactcttccagaagacttcaccccacataattttctcttttccttcatttcctaaagaaacacctcccttcctgtaca

SEQ ID NO: 8206 - protein, 75 aa, Homo sapiens
MWGEVFWKSLLDRRSKLPPNVKNTGNPGWLREALQLRGLGGILSVKGTQNTHWVTPQSSKNREFLPQDSFTVLVF

SEQ ID NO: 8207 - DNA, 206 bp, Homo sapiens
  misc_feature (1)..(1): Wherein n may be a, c, g or t
  misc_feature (2)..(2): Wherein n may be a, c, g or t
nngaattcccggagcaccgaagaaggctgcgcgaggccgaggcacgtcgtcctcgaccatctctacatcgagaagggctggggcgcacagccgctggtggccctcggctacacccacaggttccgctccaagtacgtcacctgcgtcctgtacaaggccatcgagcggtagcctgaccattgctggctgggctggtgtgggccggc

SEQ ID NO: 8208 - protein, 56 aa, Homo sapiens
  misc_feature (1)..(1): Wherein Xaa may be any naturally occuring amino acid
XNSRSTEEGCARPRHVVLDHLYIEKGWGAQPLVALGYTHRFRSKYVTCVLYKAIER

SEQ ID NO: 8209 - DNA, 304 bp, Homo sapiens
  misc_feature (181)..(181): Wherein n may be a, c, g or t
  misc_feature (182)..(182): Wherein n may be a, c, g or t
  misc_feature (211)..(211): Wherein n may be a, c, g or t
  misc_feature (295)..(295): Wherein n may be a, c, g or t
  misc_feature (302)..(302): Wherein n may be a, c, g or t
aagcttgccttcgctgatgcggcccttgatcagcaaggtcaggcgttcgaagttcgaggcgcgggatcttggggcagcttcttcgaccattttccggcccccggaagggcctttgtgaccacctttctttttccagggcgggccgaaacaggcgaataggacgctgcggatcacgccatgnncggaactcgaagtagggcgcgcgacaggngcttccttgtccttgtccacatcagccgaatgcagcagttcgttcaagtcgcgctcgtaatcgagcatcaggcgcaggcaaatnccccccncc

SEQ ID NO: 8210 - protein, 93 aa, Homo sapiens
  misc_feature (33)..(33): Wherein Xaa may be any naturally occuring amino acid
MLDYERDLNELLHSADVDKDKEAPVARPTSSSXHGVIRSVLFACFGPPWKKKGGHKGPSGGRKMVEEAAPRSRASNFERLTLLIKGRISEGKL

SEQ ID NO: 8211 - DNA, 281 bp, Homo sapiens
  misc_feature (153)..(153): Wherein n may be a, c, g or t
  misc_feature (156)..(156): Wherein n may be a, c, g or t
  misc_feature (157)..(157): Wherein n may be a, c, g or t
  misc_feature (176)..(176): Wherein n may be a, c, g or t
  misc_feature (254)..(254): Wherein n may be a, c, g or t
ggtacctgcaggaggcagtgggcgagcaggcggggcagcccaatgccatgggcctgatctcaccgctgcctccttccccagggcttcgtggcggccatctcgccctttaattttcttgcaatcggcggcaacctggcgggggcaccggccctnatnngtagatgtgggcacaggtnggacagcggcagctggttgtcctcctggtcccaacagacagacagaggccaccccgagccccttgggtctcagcctantcattgggagaggcacagaaggtggag

SEQ ID NO: 8212 - protein, 74 aa, Homo sapiens
  misc_feature (33)..(33): Wherein Xaa may be any naturally occuring amino acid
  misc_feature (34)..(34): Wherein Xaa may be any naturally occuring amino acid
  misc_feature (40)..(40): Wherein Xaa may be any naturally occuring amino acid
  misc_feature (66)..(66): Wherein Xaa may be any naturally occuring amino acid
SHRCLLPQGFVAAISPFNFLAIGGNLAGAPALXXRCGHRXDSGSWLSSWSQQTDRGHPEPLGSQPXHWERHRRW

SEQ ID NO: 8213 - DNA, 399 bp, Homo sapiens
tccggactgttatccttcatagaaacagattatatacacagcggctccttgcttaccagccctcctaccaaaaataatctctcttctcctaaacacccatgaatacttcatttgttatctgcctatgacggttattgaattattctatgcatttaaccacctaggagggccacagaatagcatagtaagagcactgtttcaggagccatgttgcctgggtttgaacctggttctatcagttattagctgtatgaccttgggtcttatctgtgcctggtttccttgtttatattaaagaggatgaggataacaatctacccatcttacagatagatcaaatgccaatacatcatttttgatgaggaattagaggtcatttttggataactggaagaattc

SEQ ID NO: 8214 - protein, 56 aa, Homo sapiens
MTVIELFYAFNHLGGPQNSIVRALFQEPCCLGLNLVLSVISCMTLGLICAWFPCLY

SEQ ID NO: 8215 - DNA, 459 bp, Homo sapiens
tggccacgcacattcaggtggttggtttcggaactactttgtaataactttttacaagcaccggtcattttttgagaatcaatttggtttgtccaacgaagtaaacactttttttctcttactatgtggcatttttctttcttaaaaacactgagctgaaacacagactgtgtctttggatcagaaccaaatcttctgagatccccattacctgaagaacactgaagacgtcctcgggaaatcatgggaaatgttccagtgaacacttgtgtaatggctaaggccagctaccttatttctgatgaaagtatttcatccagaggctgctggaggcctgtctctgacttgggactgtttccccaggcagccttattaccagaaggaaatgggatgtttgtgccaaagaggcgcttatattgtgtaaatacatttatatagagcaagactccttgctccgga

SEQ ID NO: 8216 - protein, 81 aa, Homo sapiens
MISRGRLQCSSGNGDLRRFGSDPKTQSVFQLSVFKKEKCHIVREKKCLLRWTNQIDSQKMTGACKKLLQSSSETNHLNVRG

SEQ ID NO: 8217 - DNA, 426 bp, Homo sapiens
  misc_feature (1)..(1): Wherein n may be a, c, g or t
  misc_feature (2)..(2): Wherein n may be a, c, g or t
nncaatcctgacgttgaaaatcgtcccatcctagttgagatttttagcaatgcgcgcatagctaaaatgactcttcgcagccctgaacgccgtaatgcactgaatgcggatttagccgaggccattcagttagctgtagagagagtagaacatgagggctgccgcagtctcgtcattacaggtacgggggaagtattttgtgctggtgcagatttaaccggcggtgttttttcctccggattcgctaaccaaaacgttgcaatgctacgcaccattgaacgatcgaagctcatcattgtcgcttatgtgaatggtgcagctatcggagctggtgcacagctagcaatggcgtgtgatcttcgtgtcgctgatgcagaagcatatttcgctcttcccgttgcgaagatgggttttgcactggacaat

SEQ ID NO: 8218 - protein, 132 aa, Homo sapiens
LVEIFSNARIAKMTLRSPERRNALNADLAEAIQLAVERVEHEGCRSLVITGTGEVFCAGADLTGGVFSSGFANQNVAMLRTIERSKLIIVAYVNGAAIGAGAQLAMACDLRVADAEAYFALPVAKMGFALDN

SEQ ID NO: 8219 - DNA, 264 bp, Homo sapiens
aaatttggtgctggtcttgttgtgatggagatgatctctgaaaagggtctcctctacaataatgagaaaaccctccacatgcttcatatcgatgagaatgagcatccaatgtctatccaacttttcggtggtgatgctgagggcttgaagcgtgcagccgactttatccagaccaataccaaggctgatattgttgatatcaacatggggtgtccagtcaataaggtagtcaaaaatgaagcgggggccaagtggctcaaggat

SEQ ID NO: 8220 - protein, 88 aa, Homo sapiens
KFGAGLVVMEMISEKGLLYNNEKTLHMLHIDENEHPMSIQLFGGDAEGLKRAADFIQTNTKADIVDINMGCPVNKVVKNEAGAKWLKD

SEQ ID NO: 8221 - DNA, 207 bp, Homo sapiens
ctcgagtcatcccatggaatgttagctccccttcacttctgggcggctcatgtgttaatgccaagcaggttccatggatgtccccccatcatggtgttgggcgagaggcatgtggagaggccctgccaggcgacatttacatggcactggtcaagacctgtgcaaaactggtcactggggcaatggctggaacaagaggtgaggccg

SEQ ID NO: 8222 - protein, 63 aa, Homo sapiens
MLAPLHFWAAHVLMPSRFHGCPPIMVLGERHVERPCQATFTWHWSRPVQNWSLGQWLEQEVRP

SEQ ID NO: 8223 - DNA, 362 bp, Homo sapiens
  misc_feature (131)..(131): Wherein n may be a, c, g or t
ctgcagagcagcagcgttcctgcaagggagaggagagccaaaaagctgtgtgttttggactgaggaagaagactccaaaacaaagacattctggcagcaagccaaggggcagtcatcttttatggctctcnagtacattgcagcctggagatagacagtggtgtctgaccaatttgagtgttctgagtttggggacaggggcatgacagggagagagattacattcctgcctgcccgggctatggaactggggtggctccctgcctctgtgcagagacctcagtgtacttaccaggagcttgcctgccacccccacttcagtcttctgcttgtgctcatcattggggaatccaagggccggc

SEQ ID NO: 8224 - protein, 68 aa, Homo sapiens
  misc_feature (25)..(25): Wherein Xaa may be any naturally occuring amino acid
MPLSPNSEHSNWSDTTVYLQAAMYXRAIKDDCPLACCQNVFVLESSSSVQNTQLFGSPLPCRNAAALQ

SEQ ID NO: 8225 - DNA, 434 bp, Homo sapiens
tccggaagcagaattctgttgtttcccattcatcactgtgtgccaggtgtctgagaagggggtcttataggagcccacgcagaaaccaagctcacctcagtctgggtgtggggcagtcagggaaggcattctggaaaatgtagctgactcgaaataagcacctattgaaaatagtgtgctgagccctggaacattaaaaatgtgttcctatgtggaaatcagaaatgtatgggtcccagaagagaacttgtgggtcagcctgctttccagagagtgccgaggccctttgaatggtgaacattatgcaagcgttcttgtatggccagtggccagcagggaggagggcagagaatgactgtgcctccgggaagccggcgtcaacttcccgacacgcttcaggatcatctctttgtatagaaccatgggatggatcc

SEQ ID NO: 8226 - protein, 51 aa, Homo sapiens
MCSYVEIRNVWVPEENLWVSLLSRECRGPLNGEHYASVLVWPVASREEGRE

SEQ ID NO: 8227 - DNA, 343 bp, Homo sapiens
  misc_feature (10)..(10): Wherein n may be a, c, g or t
  misc_feature (12)..(12): Wherein n may be a, c, g or t
  misc_feature (24)..(24): Wherein n may be a, c, g or t
  misc_feature (124)..(124): Wherein n may be a, c, g or t
  misc_feature (175)..(175): Wherein n may be a, c, g or t
  misc_feature (181)..(181): Wherein n may be a, c, g or t
  misc_feature (182)..(182): Wherein n may be a, c, g or t
  misc_feature (185)..(185): Wherein n may be a, c, g or t
  misc_feature (273)..(273): Wherein n may be a, c, g or t
atgaaatgtnantggtattctgcnaaggctggtgccctgcaaagctggtactccttccacttcggaaggagtctcttgtgtgtaaacgtcagtccagactgctgagggctttcttttctttttntccccctcttttgtggagactgggggtctctgtgttgcccaggctggtctntcagcnntgngctcaagaagtcctcctgcctggccctcctaaagtgctgggattatagcagtcttttggctcagcttctctctgaatagtgttgtctntaatgtatgaagaagacagaatggaatgtaggctgagtatattttgcaggtaacaggtaatggaactagt

SEQ ID NO: 8228 - protein, 52 aa, Homo sapiens
  misc_feature (7)..(7): Wherein Xaa may be any naturally occuring amino acid
  misc_feature (24)..(24): Wherein Xaa may be any naturally occuring amino acid
  misc_feature (26)..(26): Wherein Xaa may be any naturally occuring amino acid
  misc_feature (27)..(27): Wherein Xaa may be any naturally occuring amino acid
GLSFLFXPLFCGDWGSLCCPGWSXSXXLKKSSCLALLKCWDYSSLLAQLLSE

SEQ ID NO: 8229 - DNA, 368 bp, Homo sapiens
aaatttccaaaaattgctacaacaagcgccattattatctgattttgtatttgctcatttaacgggacaacacgatattagcacccctgaaggtaaaagcttagtcatgggtgaactccgtgagttgaccgagctactccctaagcaaggctcatttcgttatttgctcactcaatcgttccgcgaaaaactgggtctaggcaaacgctttaccccacaaattagccatgatgcatctttatcttttaatatccatactaaagatgaagattttgcaatagcaatcttgatgcaccacccatttctttatatccactttgaagagctgcgtgcagtcattgatcaaaatgagctattggcgaagatct

SEQ ID NO: 8230 - protein, 87 aa, Homo sapiens
MGELRELTELLPKQGSFRYLLTQSFREKLGLGKRFTPQISHDASLSFNIHTKDEDFAIAILMHHPFLYIHFEELRAVIDQNELLAKI

SEQ ID NO: 8231 - DNA, 350 bp, Homo sapiens
cgtacgtagaagtaggaaaggcaagaatgaggctcataatcagttagtgcctttgcattgtattagcaaaataccatatcatcaatctcctttctttttctgtgtctgactctgccaccttcttggcgtgcacacccggaggagcataattataggcatgtaacatatgcattgtgactttgaaagtatggaatttaaattacttcagtacattaatcacccttaccctataagtccattttactgtgcaaatgaggaaaacctactgcttgtttaccatactttgaaaaacttaaaaaaaaacctgtgcattgcttaattattggatttgtaaaaatatgctgtgatca

SEQ ID NO: 8232 - protein, 50 aa, Homo sapiens
MHCDFESMEFKLLQYINHPYPISPFYCANEENLLLVYHTLKNLKKNLCIA

SEQ ID NO: 8233 - DNA, 326 bp, Homo sapiens
accggtttctcagagttccgtaccttcagtcgctgccaacattgtggactctgcagtatcgggagcgactaacataacgacagacaagattgtaaaggagaaaagcaaatgacaaaagttccaacatggaaacttgtactgctacttatttatgcatgtttagtcatatccatattgatgttcacgctaagcttggtagtccagtggttaggtggaggtaatgaattttttggaccctcgcaattatatgttgcgttaaaaatggggtttgtggggtttgtttttagcgttgttttatggctggcatattatattccatataagga

SEQ ID NO: 8234 - protein, 72 aa, Homo sapiens
MTKVPTWKLVLLLIYACLVISILMFTLSLVVQWLGGGNEFFGPSQLYVALKMGFVGFVFSVVLWLAYYIPYK

SEQ ID NO: 8235 - DNA, 225 bp, Homo sapiens
  misc_feature (225)..(225): Wherein n may be a, c, g or t
cagattcattaccaaggataccgtcgcggtcatgtagtcgctgatctagaaatcatcggtgagacagaccgtacaggtacgacagttcactttacaccagatccagagattttcactgaaacagtagaatttgactttgaaaagctcaataagcgggtgcaagaattagccttcctcaaccgtggtctcagaatttccatcactgataagaggctggagtgtgcn

SEQ ID NO: 8236 - protein, 75 aa, Homo sapiens
QIHYQGYRRGHVVADLEIIGETDRTGTTVHFTPDPEIFTETVEFDFEKLNKRVQELAFLNRGLRISITDKRLECA

SEQ ID NO: 8237 - DNA, 270 bp, Homo sapiens
cggagtgctcccgatgaaactaaaagatctatttctcctggatatgcaagccatgtttcatctgtgacaccgcagccaccatccgcttctaccccaccttctcaatttttcagtttttctcctgaagtgagccttcgaaagaatgagaacataacgccattgcccacgcctgttcccgtacctgttggtgtgccacctcttgctcccccggctcatggtccattttcgacttcgatgctacctatgttgggtgctcctccgggaacggta

SEQ ID NO: 8238 - protein, 90 aa, Homo sapiens
RSAPDETKRSISPGYASHVSSVTPQPPSASTPPSQFFSFSPEVSLRKNENITPLPTPVPVPVGVPPLAPPAHGPFSTSMLPMLGAPPGTV

SEQ ID NO: 8239 - DNA, 282 bp, Homo sapiens
  misc_feature (1)..(1): Wherein n may be a, c, g or t
  misc_feature (2)..(2): Wherein n may be a, c, g or t
  misc_feature (3)..(3): Wherein n may be a, c, g or t
  misc_feature (4)..(4): Wherein n may be a, c, g or t
  misc_feature (5)..(5): Wherein n may be a, c, g or t
  misc_feature (7)..(7): Wherein n may be a, c, g or t
  misc_feature (8)..(8): Wherein n may be a, c, g or t
  misc_feature (9)..(9): Wherein n may be a, c, g or t
  misc_feature (10)..(10): Wherein n may be a, c, g or t
  misc_feature (11)..(11): Wherein n may be a, c, g or t
  misc_feature (12)..(12): Wherein n may be a, c, g or t
  misc_feature (13)..(13): Wherein n may be a, c, g or t
  misc_feature (14)..(14): Wherein n may be a, c, g or t
nnnnngnnnnnnnnaggtcctgtttttgcaaattttgttttggcggatgaaatcacccgtgctcctgcaaaagtacaatctgcacttttggaagtaatgcaagaaaaacaagtgactattggtgatgaaaccatgaaaatgcccaccccgttttgggtttaagcaactcaaaatccaattgaccaagaaggaacttatcttttgccagaagcacaaaccgaccgttttatgctgaaatgcaaaattgattatccagaatttgaggaagaaagacaagtcatg

SEQ ID NO: 8240 - protein, 53 aa, Homo sapiens
  misc_feature (1)..(1): Wherein Xaa may be any naturally occuring amino acid
  misc_feature (2)..(2): Wherein Xaa may be any naturally occuring amino acid
  misc_feature (3)..(3): Wherein Xaa may be any naturally occuring amino acid
  misc_feature (4)..(4): Wherein Xaa may be any naturally occuring amino acid
  misc_feature (5)..(5): Wherein Xaa may be any naturally occuring amino acid
XXXXXGPVFANFVLADEITRAPAKVQSALLEVMQEKQVTIGDETMKMPTPFWV

SEQ ID NO: 8241 - DNA, 186 bp, Homo sapiens
gatctgaccctttgtcggtattcttgtttagcgttagagagaatggttcccaagagaagcactattattaccaaggcaataaatcaagagcttgaagatgttgcagtgaaaaagttgtatgccataattatcaactataccaaggataatgaatattatcctatgtgcgaacaagcgcttagtgca

SEQ ID NO: 8242 - protein, 62 aa, Homo sapiens
DLTLCRYSCLALERMVPKRSTIITKAINQELEDVAVKKLYAIIINYTKDNEYYPMCEQALSA

SEQ ID NO: 8243 - DNA, 325 bp, Homo sapiens
gtgcacttcttgagccgaggccagtcgcgtgccgtccgcactgctgtgcattcgcataggtggtacatggatcagacgcggcaaatcctcctgggatgcgctcaatgccgacgtgctctgcagcacttcaaacagcctctcgagcaactcggcctcgccatgccgctcgcgagccaacacgtcctctacaagggcctcgccccatcggactttgggccatgggtcgttcggggagctgttgctgaggccacacacattcggttcttgcaacgtgcggatgggcgcatcactcggtcggttcgtcagatagctcatatgcacgcgt

SEQ ID NO: 8244 - protein, 105 aa, Homo sapiens
MSYLTNRPSDAPIRTLQEPNVCGLSNSSPNDPWPKVRWGEALVEDVLARERHGEAELLERLFEVLQSTSALSASQEDLPRLIHVPPMRMHSSADGTRLASAQEVH

SEQ ID NO: 8245 - DNA, 463 bp, Homo sapiens
tctagaggttacgctccatcgcaaagccaacagaactattatccacctcaacaacagcagcagcagtatcagcaacaacctcaatactatcagcaacagcagccccaatattaccaacaacacccacagcagcccatttatgtccaacaacaaccggccagttctggaaatgaagactgtctagcgggctgtctagcgggtttatgtttatgctgtactttggatatgctgttttagagtatctccatatgttgtgggagcaaaccctttcacacaaatccactatataaaacaaagcacaattgcacctctgatcttttaatcttaattaaataagcgtgattaaagtgttcatgcaagtagataatatataatgatgataagttcgaaaatgcccttataaaaattaaaccgcgtgctagaagtaaacctccttcaacctgcctcttgaacgaataagctt

SEQ ID NO: 8246 - protein, 78 aa, Homo sapiens
SRGYAPSQSQQNYYPPQQQQQQYQQQPQYYQQQQPQYYQQHPQQPIYVQQQPASSGNEDCLAGCLAGLCLCCTLDMLF

SEQ ID NO: 8247 - DNA, 246 bp, Homo sapiens
tccggaggtaaggtgatgacactcgcaggacactcaaagcctatttacaccgtagcttggtcaccaaacgggtatcaagtagccactggtggtggtgatggaatcattaatgtttgggacatcagaaaacgggatgaaggccaactaaatcaaatattggcgcatcgtaacatcgttacgcaggtaaggttttcaaaggaagacggcggaaagaaacttgtctcttgtggctatgataatttgatc

SEQ ID NO: 8248 - protein, 82 aa, Homo sapiens
SGGKVMTLAGHSKPIYTVAWSPNGYQVATGGGDGIINVWDIRKRDEGQLNQILAHRNIVTQVRFSKEDGGKKLVSCGYDNLI

SEQ ID NO: 8249 - DNA, 201 bp, Homo sapiens
ctagtggtggtgactgtgttcttctctctccttgctctttttgtggtggttttacagccttggagacagaagcagaatgaggatcatcctgtcaaagccgggcttcatggaggcaactactctggatctgacaattgttcccaatttgtccggagggcagaaatgcaagaggctatccagagtctcagggcctctgggaat

SEQ ID NO: 8250 - protein, 67 aa, Homo sapiens
LVVVTVFFSLLALFVVVLQPWRQKQNEDHPVKAGLHGGNYSGSDNCSQFVRRAEMQEAIQSLRASGN

SEQ ID NO: 8251 - DNA, 214 bp, Homo sapiens
acgcgtgaaacctacaaaaggaataaaggaacctggatgacaatggctgcaaggcaaggcggggggtggtccagatgagtggaggaggcctacaccaaattgcctgcctgggacaaatgtttgtatttttttcttttccatgaactgaacctcccagcttctcctggaggaacacattctggttttacatcaacagacaagaaaggcgtccctt

SEQ ID NO: 8252 - protein, 59 aa, Homo sapiens [sequence omitted]

SEQ ID NO: 8253 - DNA, 281 bp, Homo sapiens
cttaagctcatgtcgctgaatcataatatggagaaaagcattctacaatggtctttctggtacttctattaacaaatccccaaggatggaattaaaagtggacctatctagtgttagattagattcatggtattataactggttttttgtttgttttacattattcagtggtgacatctataggcctatgattagaaacactaacagactaatgctgaatttacctgtactattttatgactggtgtgagtctaacctcataccaaacattactttgggtg

SEQ ID NO: 8254 - protein, 65 aa, Homo sapiens [sequence omitted]

SEQ ID NO: 8255 - DNA, 305 bp, Homo sapiens
acgcgttgtcttctctccgtactcatagcctctattggtaaggtctgtgaatccaaaatggtttatttatctttaattagaaagaaaaaatatcatacaaaaaacattccgtgaagcatgagtagcatgtaaaattcaaacttcagtatccataaggaaagttttattagaacacaggcatgcccatttgtctatacctattatgctccaagagcaggcagtgttaggtagttttgacaaggacttcatgggtccacagagcccaacatttactatctgatctttcctgcctgagaccatctaga

SEQ ID NO: 8256 - protein, 54 aa, Homo sapiens
MVSGRKDQIVNVGLCGPMKSLSKLPNTACSWSIIGIDKWACLCSNKTFLMDTEV

SEQ ID NO: 8257 - DNA, 347 bp, Homo sapiens
  misc_feature (347)..(347): Wherein n may be a, c, g or t
accggtgggtctcctatccggcacaaggggggggtgggcgtctgggcagatgtgggagggagggcgccggtgggtctcctgggggccaggcgtgtgtacgacttagctgtgagcacacacggtcctgcccaaggggccaacgtctgggggatgcagacaagaggcaggggtggagggtgctgggctcccggacagccccagggggtgtcggggctgtcaggagacaaccccacccccctctgctgtgtggaccaggacggggctcaggacagccgggctctcttccagggatacagagaggccctataattgattactaactgctgggtgaggtgtgcctaagctgn

SEQ ID NO: 8258 - protein, 52 aa, Homo sapiens
MQTRGRGGGCWAPGQPQGVSGLSGDNPTPLCCVDQDGAQDSRALFQGYREAL

SEQ ID NO: 8259 - DNA, 285 bp, Homo sapiens
  misc_feature (1)..(1): Wherein n may be a, c, g or t
ngtggagggaatgtgatcatgagccagcagaatcgtctcttcggcgtgattgagacctatcgagaccgtctccctatggacggaattgaccagatcgtgacgttgggggagggggcgaccccgttggtgcctgccccacgattgggcgccgagcttgacgcgacggtatgggttaaagttgaaggggccaatccgaccggatcgttcaaggatcgtggcatgacgatggccatgacgaaagcccttgccgacggctcgaaagccgtggtgtgtgcctctaccggt

SEQ ID NO: 8260 - protein, 95 aa, Homo sapiens
  misc_feature (1)..(1): Wherein Xaa may be any naturally occuring amino acid
XGGNVIMSQQNRLFGVIETYRDRLPMDGIDQIVTLGEGATPLVPAPRLGAELDATVWVKVEGANPTGSFKDRGMTMAMTKALADGSKAVVCASTG

SEQ ID NO: 8261 - DNA, 334 bp, Homo sapiens
  misc_feature (307)..(307): Wherein n may be a, c, g or t
tttttgagagcctataacctcccagaaagcatgcccatagaaaaacgagaaaatttaagcaaggtttctaacatctttttagcgttgcttttttttatttctagcatgctttttggatctttttggcgcttgcctaaaccgattaggaccctaaaactgagtttagaaagcgccgacaaaaacgaattgcaaaatgccatccagcgatacgatgcgctaggggtccattttgaaacattgacggggtggaataaagtcaaagaagaattactaaaagtgataaattatttaaaaacccctaaaaaantcccggatttagggatttttctcctaa

SEQ ID NO: 8262 - protein, 111 aa, Homo sapiens
  misc_feature (103)..(103): Wherein Xaa may be any naturally occuring amino acid
FLRAYNLPESMPIEKRENLSKVSNIFLALLFFISSMLFGSFWRLPKPIRTLKLSLESADKNELQNAIQRYDALGVHFETLTGWNKVKEELLKVINYLKTPKKXPDLGIFLL

SEQ ID NO: 8263 - DNA, 312 bp, Homo sapiens
  misc_feature (1)..(1): Wherein n may be a, c, g or t
  misc_feature (312)..(312): Wherein n may be a, c, g or t
nggtagccccagtctcaggtgtgaaataagcctgtctccagtccacccagccccctgagaaggaaggagttttggattcctgggattgatgagttatttgcccgtgggtgttgaaaggaagagaggagggaaccagaatgcaggtatttcttttcttgggtgattcctccttgaagtctgcctgtgcattttggacttacttcttgttatactctgcctttgagactgatgggtctaaaattcaaagctctcacacacacactggggtgatacagacatccttgagggtattgaggtgaagggggaggaaan

SEQ ID NO: 8264 - protein, 53 aa, Homo sapiens [sequence omitted]

SEQ ID NO: 8265 - DNA, 336 bp, Homo sapiens
gcgtcttctggttcatacagacaaccccaggaacagcctcaatattcgcgttctggtcactatcagtattcaaacggccattctcaccaacaatattctagtcaatataatcaacgtcgacgttataaccataatgatggtacaaggcgacgctataatgacgatcgcccacatagttcaaacaatgcaagtacgcgacagtactatgctactaacaacagccaaagcggcccatatgtaaataagaaatctgacatcagtagtcggaggggcatgtctcaatcacggtattcaaatagcaatgttcacaatacattagcgtcttcgagtggatcc

SEQ ID NO: 8266 - protein, 112 aa, Homo sapiens
ASSGSYRQPQEQPQYSRSGHYQYSNGHSHQQYSSQYNQRRRYNHNDGTRRRYNDDRPHSSNNASTRQYYATNNSQSGPYVNKKSDISSRRGMSQSRYSNSNVHNTLASSSGS

SEQ ID NO: 8267 - DNA, 378 bp, Homo sapiens
tctagattcaagcggtgaactccaacgtcgactgtgagtgggggaatgcgcggtggtagcagttgtttgcggctggcagcttctttgtcgtcctttctctgtcgccagttcttccagacccatctgctcatccagccgagtcccgaaaggcctgcggcgatgaggagtccgaggacgaatgcgacgaagggatggttcgtccacaggttgtccagtgggccgatcaagtccgtccacgaatgatcggacggtgctgtgggtgagggcataggcgagggggacggctctgtcacggtacggacctcaggggggaggagaggaagactgttgtggggcatctaccgagcaccctcgtttctcaggatctcagtcatgcct

SEQ ID NO: 8268 - protein, 112 aa, Homo sapiens
MPHNSLPLLPPEVRTVTEPSPSPMPSPTAPSDHSWTDLIGPLDNLWTNHPFVAFVLGLLIAAGLSGLGWMSRWVWKNWRQRKDDKEAASRKQLLPPRIPPLTVDVGVHRLNL

SEQ ID NO: 8269 - DNA, 308 bp, Homo sapiens
acgcgtacacgccaatcaccgccagcaggctggtccacaaccagtggtcgtagcgccgttgtgccaagtccatggtggcgtggctgtagaggaacacggcggcaaacaacgctaccgcaatccccttccgtcagcagcgagcccttatgcctgcgcagccagtcgcgcaacaggtagccgtagatgaaataggtgctgctgatcaaggtgatctcaaggctgaagggcaggccgggcagcgtccaggcgtgcccgccgacggtcaccgggatttgccagaaccacggcaatacccaaataccgatcag

SEQ ID NO: 8270 - protein, 54 aa, Homo sapiens
MPAQPVAQQVAVDEIGAADQGDLKAEGQAGQRPGVPADGHRDLPEPRQYPNTDQ

SEQ ID NO: 8271 - DNA, 415 bp, Homo sapiens
  misc_feature (205)..(205): Wherein n may be a, c, g or t
  misc_feature (231)..(231): Wherein n may be a, c, g or t
  misc_feature (285)..(285): Wherein n may be a, c, g or t
  misc_feature (298)..(298): Wherein n may be a, c, g or t
  misc_feature (327)..(327): Wherein n may be a, c, g or t
  misc_feature (333)..(333): Wherein n may be a, c, g or t
  misc_feature (353)..(353): Wherein n may be a, c, g or t
  misc_feature (356)..(356): Wherein n may be a, c, g or t
tgtacacgtcctgtagactctgtcttctctgaatctataggttctctctttcccattgccctgtatactggtttatgctctcattacttctcgcttgaattattccagaagtctcccaactggtctgaagcttaattttcattatgtgctgttcgatgtcattccaccacgcagaatctatggcttccccattgtctcctgagtntagtttagtgcatgagaccgtttaanatctacctacacctcttctatgtgcatgcatttctctagtcataagagaggatntgatctatctcanaatgtgttcttatatttgcatttactggnttttanctccctccatcctatctatnatntgcaccatgttgctcacccatgcacccactccccagacaccttgtgagaacagtgatca

SEQ ID NO: 8272 - protein, 50 aa, Homo sapiens
  misc_feature (12)..(12): Wherein Xaa may be any naturally occuring amino acid
  misc_feature (16)..(16): Wherein Xaa may be any naturally occuring amino acid
  misc_feature (26)..(26): Wherein Xaa may be any naturally occuring amino acid
  misc_feature (28)..(28): Wherein Xaa may be any naturally occuring amino acid
  misc_feature (35)..(35): Wherein Xaa may be any naturally occuring amino acid
  misc_feature (36)..(36): Wherein Xaa may be any naturally occuring amino acid
MCMHFSSHKRGXDLSXNVFLYLHLLXFXSLHPIYXXHHVAHPCTHSPDTL

SEQ ID NO: 8273 - DNA, 397 bp, Homo sapiens
tgtacagatgctaaaatggagggccagaggattggccagggtctcccgttgctctgcacctccccagtcctgaggggccacgcgggtgtgggctcaggtattgtgttccagccttgggatggagacggggcaggggcttgggggcagttaggagaaagggagaggatgtgacctttcttggtttaatctttgaccagtggggaagaccagagccctatccctgccctgtccctgcttgtccctttaggaatgttgctgagaagctagtacctcagaaatcagggtctccagcttccctctggctcttagcagaggagaaggcagaggcccacaggagtagcaagtccaaagtcctacagcacgtctgggccggaccagcttggggtctgctcttgcc

SEQ ID NO: 8274 - protein, 51 aa, Homo sapiens [sequence omitted]

SEQ ID NO: 8275 - DNA, 365 bp, Homo sapiens
aagctttggcatctttaacaagcagtttccaagactgccctagtcatggccatgtaaccagcaaggcggaagagatgagcaggtgcctgcaggagaggttaggcgcagggctagatgtggcatacagacttttggctctccctctttggccagagttcagtgacatgggaccagctaactaggcaggaaagggagtccagctgtgtttccaagaggaaagagaaatgggctggaagtagccagccagtccctgccacagttgggaaaataaaagctcacatgaaacaacacataataaacgtatcaagtatacagaagtcacttgattattgggtagagctgatctcccgttaatggcagaattc

SEQ ID NO: 8276 - protein, 79 aa, Homo sapiens [sequence omitted]

SEQ ID NO: 8277 - DNA, 346 bp, Homo sapiens
  misc_feature (1)..(1): Wherein n may be a, c, g or t
  misc_feature (2)..(2): Wherein n may be a, c, g or t
  misc_feature (63)..(63): Wherein n may be a, c, g or t
  misc_feature (64)..(64): Wherein n may be a, c, g or t
  misc_feature (77)..(77): Wherein n may be a, c, g or t
  misc_feature (126)..(126): Wherein n may be a, c, g or t
  misc_feature (133)..(133): Wherein n may be a, c, g or t
nnggccggccccgacggtatttcggctcgcgtcatccgccccctcgttcctgcaaccatcctnntggggagtgtctnaggagccttaacgcggtgtttatacgaagctcgtgaagccggacgcatnatgttcnttggccctggagccggaggatctcccacggcatcagccgttatgggagacctcgtcactgtggcacgtaacctcgtgcgaggggttgctggtccgcctcaggacgtttacggggagttcccgatcttgccaatgtccgaggtccacacccggtttaacatacgtttgcaagttcgtgacgagcccggtgtgctcgccgaaatcgcaaagatct

SEQ ID NO: 8278 - protein, 115 aa, Homo sapiens
  misc_feature (1)..(1): Wherein Xaa may be any naturally occuring amino acid
  misc_feature (22)..(22): Wherein Xaa may be any naturally occuring amino acid
  misc_feature (26)..(26): Wherein Xaa may be any naturally occuring amino acid
  misc_feature (42)..(42): Wherein Xaa may be any naturally occuring amino acid
  misc_feature (45)..(45): Wherein Xaa may be any naturally occuring amino acid
XAGPDGISARVIRPLVPATILXGSVXGALTRCLYEAREAGRXMFXGPGAGGSPTASAVMGDLVTVARNLVRGVAGPPQDVYGEFPILPMSEVHTRFNIRLQVRDEPGVLAEIAKI

SEQ ID NO: 8279 - DNA, 206 bp, Homo sapiens
tcatgaataaaagcccgtcagggatataagagtggtgggagtgatgcaatggggcttgatgccattcatcgctttcttcctcacgttctggattctttcgtatcctatcctatggcccgtgtctattctttatttgatctacatgttcgctgatccatcgcctgagcgcgcgggtaagcagcccagctggacgcggaaaagcacct

SEQ ID NO: 8280 - protein, 54 aa, Homo sapiens
MQWGLMPFIAFFLTFWILSYPILWPVSILYLIYMFADPSPERAGKQPSWTRKST

SEQ ID NO: 8281 - DNA, 294 bp, Homo sapiens
  misc_feature (1)..(1): Wherein n may be a, c, g or t
  misc_feature (2)..(2): Wherein n may be a, c, g or t
  misc_feature (3)..(3): Wherein n may be a, c, g or t
nnnggcgagggggttaccgtgggggacctgacgatggatcctgctgcccatctggttcaactgggaggcgaggagatctcactcactccgttggaatactccctgctcgttacgatggcccaataccccaatagggtattcagcagggagaccctattgcgtgaggtatggggatacaccaacatcaccgatactcggttggtcaacgtccatgtgcagagactgcgttctaaggtggagcgcaacgcggaccatccccaaatgatcgtcactgttcgtggcatcgggtacccc

SEQ ID NO: 8282 - protein, 98 aa, Homo sapiens
  misc_feature (1)..(1): Wherein Xaa may be any naturally occuring amino acid
XGEGVTVGDLTMDPAAHLVQLGGEEISLTPLEYSLLVTMAQYPNRVFSRETLLREVWGYTNITDTRLVNVHVQRLRSKVERNADHPQMIVTVRGIGYP

SEQ ID NO: 8283 - DNA, 390 bp, Homo sapiens
gtgcacagacttttcgagcgggccattaagtggtttacgtctgggatcggctccgctttctcgcatttttcggatcaggtcaaattctgtgctcggcattgacaggaaattgacgtgtatcagtcgattctttgcagtgtctggacggcaggctgaataggctgaaagcaggacaactacgaccatgccgcaccatgtggatcgtctaccgttttggccttgccgccattgccttgatcgccctgattgcgctgttcgtgtgccagtaccggctatcggccaggctggcgcgccggaagcgaagctcgatgggcagcaggcgcatgaggaacccggcgccattgaatcgtgaggcgctggcggagcgcggcccgttcaaatgcgacgcgt

SEQ ID NO: 8284 - protein, 114 aa, Homo sapiens
MAPGSSCACCPSSFASGAPAWPIAGTGTRTAQSGRSRQWRQGQNGRRSTWCGMVVVVLLSAYSACRPDTAKNRLIHVNFLSMPSTEFDLIRKMRESGADPRRKPLNGPLEKSVH

SEQ ID NO: 8285 - DNA, 353 bp, Homo sapiens
  misc_feature (22)..(22): Wherein n may be a, c, g or t
caattgcattttctatactggngaaaaaacgatgcactttgtatgaacatatttgagatacagcagcacagagaaaaaaataatcccaaggtagaggatatggtggtagtggggggatgggagggtgagtgggaagaaatagctgctgtggcaatcttgggccttcaaaaagaactgaagaaagctagaaggaaattcaagttctattagtctggaatacatgaacatttcttcaagtagtaatgtctaaacaacataaaattaaatttcctttactgactagtatttatataatcacattgtaagtacactttattgattttctgttttagaatcaacctagaaaatgtaca

SEQ ID NO: 8286 - protein, 71 aa, Homo sapiens [sequence omitted]

SEQ ID NO: 8287 - DNA, 380 bp, Homo sapiens
gcgtaccgtgcgtcaatgaacatgggcacgttgacaggagccccgaaactgcgcgccaccgaattgctccgcgagctcgaaggcaagcgccgcggctcgtacggcggagcagtcggctacctgcgcggcaacggggacttcgacacctgcatcgtcatccgctcggcctatgtgcacggaggaatggccaccgtgcaggccggagcgggcgtcgtgcgcgactccgtgccgcaggccgaggccgatgaaaccctgcataaggcatacgccgtgctcaacgcccttgcaatggcctccagccgcgaagtggaggtggtccgatgaccgcgcgcattgtcctgctggataaccgtgactctttcgtctacaacctcgtcgac

SEQ ID NO: 8288 - protein, 107 aa, Homo sapiens
AYRASMNMGTLTGAPKLRATELLRELEGKRRGSYGGAVGYLRGNGDFDTCIVIRSAYVHGGMATVQAGAGVVRDSVPQAEADETLHKAYAVLNALAMASSREVEVVR

SEQ ID NO: 8289 - DNA, 360 bp, Homo sapiens
acgcgtacagtacccacttcgaccaatggtcagggaatggtcagtgacgttcgagtacagtcttctacctgtttgtaggtcgcctgtcggcagcgaatcaaatattatgagtccattgtttttgcaaatagagatgtaggtcagtgagtccaatctgatgctcccaggtaatatcggttgaatcgccctttttttcctctatagatttcaggtatatggcgtaacgtgcaggccgagcttggccgtggctattcttagattgcttcgggcgagattgcgaatagctcgtcgagcattttctcatgcttactctgtgtgacggagtagaagattttccgggcaaggagatccttttcatgt

SEQ ID NO: 8290 - protein, 86 aa, Homo sapiens
MKRISLPGKSSTPSHRVSMRKCSTSYSQSRPKQSKNSHGQARPARYAIYLKSIEEKKGDSTDITWEHQIGLTDLHLYLQKQWTHNI

SEQ ID NO: 8291 - DNA, 173 bp, Homo sapiens
  misc_feature (1)..(1): Wherein n may be a, c, g or t
  misc_feature (2)..(2): Wherein n may be a, c, g or t
  misc_feature (3)..(3): Wherein n may be a, c, g or t
  misc_feature (173)..(173): Wherein n may be a, c, g or t
nnntgcgtcctcatcctcgcggcgatctcccacgatctccagacaccgctcacccggatgcgggtgcgcgtggagacaggcgtcgagggccccgaacaggaccggatcctcggcgatctcgaggcgatcgagacgctcgtccgcgaggggattgcctacgcccgcagcgtgcn

SEQ ID NO: 8292 - protein, 57 aa, Homo sapiens
  misc_feature (1)..(1): Wherein Xaa may be any naturally occuring amino acid
XCVLILAAISHDLQTPLTRMRVRVETGVEGPEQDRILGDLEAIETLVREGIAYARSV

SEQ ID NO: 8293 - DNA, 357 bp, Homo sapiens
cccaagaacggacatgcagatgataacaatcttattcataacaatatagtattcacagacgctattgatgataaggtcctgaaagagatcatcaagtgttccacaagtaaacgcggcgacaatgacttgttttatgacaaaatatgggaacgtttgagagaaaaaaggctacaaataataaaatgggtagattataaggaaattgcttatctaagttggtggaagtggttccataatcaaatgacttcgaaatacacttatgatggagaggctgataccgatgttgaaatgatggcagtggatactgatgtggatatggatgcgtaacttactattattataatatacctatgtaca

SEQ ID NO: 8294 - protein, 108 aa, Homo sapiens
PKNGHADDNNLIHNNIVFTDAIDDKVLKEIIKCSTSKRGDNDLFYDKIWERLREKRLQIIKWVDYKEIAYLSWWKWFHNQMTSKYTYDGEADTDVEMMAVDTDVDMDA

SEQ ID NO: 8295 - DNA, 216 bp, Homo sapiens
acgcgtagataacgatcctggcttggctgtgggtgtcgccacgacttctgtactctccctcaaaggagaaagatgaccttaaggcaacataagcttcttttccaggcacgtctgcagagcatgacaggtgccagcgagaagccatctgcaggtgccacatgacactggtggagacatgcacaccttctacccggaggcctcgaggcaaactctaga

SEQ ID NO: 8296 - protein, 53 aa, Homo sapiens
MWHLQMASRWHLSCSADVPGKEAYVALRSSFSFEGEYRSRGDTHSQARIVIYA

SEQ ID NO: 8297 - DNA, 350 bp, Homo sapiens
aagcttcaggtttcacaccgaagattcgagccatccggcttgttgcgcatcagcggccccactggatttgcagccctccatctggtcccggcgacggctgcgttcctcaaaatccatccaaaaatcgaggtcgaggtaagtacttacgaccggtatgtcgatctcgtcgaagacaacctcgatcttgccgtccatatcggaccgctagccgactcggtggccaaggcaaaacgtctcgccgacctgcggcgggtgttctttgccgcacccgactacttcgccaaacatggccggccgaaacacccgcacgatcttgcaacgcatcaatgcatcgttcgcacggcacgcgt

SEQ ID NO: 8298 - protein, 116 aa, Homo sapiens
KLQVSHRRFEPSGLLRISGPTGFAALHLVPATAAFLKIHPKIEVEVSTYDRYVDLVEDNLDLAVHIGPLADSVAKAKRLADLRRVFFAAPDYFAKHGRPKHPHDLATHQCIVRTAR

SEQ ID NO: 8299 - DNA, 522 bp, Homo sapiens
accggttctcctggtttggtgtgcgaaccgcggacgatgacgggacgctcggtcctgtgccgtgtggaaattatgccgtcgatatgctcgtttccaccatggaagcccttcctattgagggcctagaaccgccacagaatcgccgtcgaggtgatggcttcaacgctacggagttcattcagacgacggatcctgaggtagagcgccgccgcgctaagcagctcctattcaagctcaccgactcgaagtaatcgaacgttcgggcccttcggagcactgatttctcgtcgcttcataagcctggtgtggctagcccggtacgtaggcgtcagtacgggtagtcacccttgatgacgaagtagctaccgcggatggttccggcgagttttgagcgttgccgggcgaacttgaacgcggacaactcagctggttggtccatgccgtcacacagcttgaaccctactgcccgttttccggaattcgccaccgtccacagcacgttgatcgccaggcccgacgcgt

SEQ ID NO: 8300 - protein, 55 aa, Homo sapiens
MLVSTMEALPIEGLEPPQNRRRGDGFNATEFIQTTDPEVERRRAKQLLFKLTDSK

SEQ ID NO: 8301 - DNA, 281 bp, Homo sapiens
acgcgtcttgtagccgtagggtcaggaaagtgagcagcgcttcgatacccccacgacgccccccgggacgtttgcgtcgtggttaccgatggctgcacgcccaccccatgatcctcgattcagtaatggccttcctcgtcctcatcgccgcattcgcgacgtggggacacgacaccaaccacaacaccgcttaccgcgcatggatggcgctgtgggtactgactgtctgtgcgtcctgggtgtgggcccgcaccaagccggaaaggaccgcttcggagcta

SEQ ID NO: 8302 - protein, 64 aa, Homo sapiens
MAARPPHDPRFSNGLPRPHRRIRDVGTRHQPQHRLPRMDGAVGTDCLCVLGVGPHQAGKDRFGA

SEQ ID NO: 8303 - DNA, 416 bp, Homo sapiens
  misc_feature (1)..(1): Wherein n may be a, c, g or t
  misc_feature (345)..(345): Wherein n may be a, c, g or t
  misc_feature (394)..(394): Wherein n may be a, c, g or t
  misc_feature (395)..(395): Wherein n may be a, c, g or t
ntgtacattgtcctgttatttctattttccaagtacccaaccagagtttactggagacctgtcttatggggaatcgggctacagtttcttcttgggctcttgattctaaggactgaccctggatttatagcttttgattggttgggcagactagttcaggtcctgccgatcgtggttttcttcagcactgtgatgtccatgctgtactaccctggactgatgcagtggattattagaaaggttggatggatcatgctagttactacgggatcatctcctattgaatctgtagttgcttctgggcatatatttgttggacaagtaagttgtaatatcagcagaacnaaacatctgttgaaatggatcgtctctttccagaaagccccaatagagnnatacagcatgttcttttagtg

SEQ ID NO: 8304 - protein, 137 aa, Homo sapiens
  misc_feature (1)..(1): Wherein Xaa may be any naturally occuring amino acid
  misc_feature (132)..(132): Wherein Xaa may be any naturally occuring amino acid
XYIVLLFLFSKYPTRVYWRPVLWGIGLQFLLGLLILRTDPGFIAFDWLGRLVQVLPIVVFFSTVMSMLYYPGLMQWIIRKVGWIMLVTTGSSPIESVVASGHIFVGQVSCNISRTKHLLKWIVSFQKAPIEXYSMFF

SEQ ID NO: 8305 - DNA, 269 bp, Homo sapiens
actagttacgcactcatctgttgcagcatatcagctgcggctgtactgtagaagaatgcaacgccctagtggcaaatgctgactccaggaatgcggagggggaggaggactgcatagctcatcactgggggccacttgactggagcagctgtgctgcaaaccatcgcctctcttccaccttttttgcatattcctcttgtaccaattttgaacaggaaatagtattttgtaaagtaagtgtactggcaaactaggcccaagtcagatct

SEQ ID NO: 8306 - protein, 52 aa, Homo sapiens
MQKRWKRGDGLQHSCSSQVAPSDELCSPPPPPHSWSQHLPLGRCILLQYSRS

SEQ ID NO: 8307 - DNA, 240 bp, Homo sapiens
ctaggtacagtgaatttcttctccactattattgctgttatggtcgtagacaaaataggccgtcgtaaatgtctgttattcggagcggcttcaatgatggcttgtatggtcatatttgcaagtatcggggtaaaatgtctttaccctcatggccaggatggtccatcctcgaaaggtgcaggtaatgccatgattgtgttcacatgcttctatatattctgctttgcaacgacatgggcc

SEQ ID NO: 8308 - protein, 80 aa, Homo sapiens
LGTVNFFSTIIAVMVVDKIGRRKCLLFGAASMMACMVIFASIGVKCLYPHGQDGPSSKGAGNAMIVFTCFYIFCFATTWA

SEQ ID NO: 8309 - DNA, 399 bp, Homo sapiens
  misc_feature (354)..(354): Wherein n may be a, c, g or t
cgatgctttaggaactgtttttcacccttaactcaaatggtttcaaactatattcctctccttcccactccaggatagggacaaattccaagcctagccacacaaagcattccatcactctggccacagggactgcctctaggatgggcaaagacccaagtcaggtctatgaaactaccatacagtggtgcgctggaactgtacagaaagggaaattctctttcttcttgggcttctgaggttgaaggaagtaagcctagtgctggtattacaatctttcttcttgggtttctgaggttgaaggaagtaagcctagtgctggtattacagtcttgcccagggaatctgactccnaagccttacatttccacactgaatcccaaatatgcaaagggaacc

SEQ ID NO: 8310 - protein, 77 aa, Homo sapiens [sequence omitted]

SEQ ID NO: 8311 - DNA, 399 bp, Homo sapiens
agatctgaagtaaaaatttacaagtaagcatgtgttcatttgtggtggcaggcacatggcttctttcagggtgatttttccttttaaaaataagcatacctggggtcactctgtctcactttcttcttccagagcctggccctccctcccttctcttcatcaaggagttagaatcaagaatgtcatcaatcatgggaacaacttcttgctgttcttgtaggacctttttatcttgtctctgagacagtgtcttttcttcccctggctttatcaaggaatttaacctttctagcattcgtctagaacttgcagtaagcgtgatattaaaagcaaagcatccactccagtgatcttgctgggaaaaaattacatgatttctaaagtgctgtgagtcaaact

SEQ ID NO: 8312 - protein, 59 aa, Homo sapiens [sequence omitted]

SEQ ID NO: 8313 - DNA, 352 bp, Homo sapiens
  misc_feature (1)..(1): Wherein n may be a, c, g or t
  misc_feature (352)..(352): Wherein n may be a, c, g or t
nggagcaacacctggtccttgggaatgaagtgtaggagttgcatttgctgaggttggtgtttgccaaagagatgccagcttcttcgaactactgctgtgcaactcttcatgttcaaaacccagttttctgtttttcacacctgaacatacacccccctgcagttgggtggctcccccgttaccagctgggctctatctacagagagagcaatggcttcccttcccttgaaggaagtctcaccctcacaaggacacttgatccgctgcaaagcagaaagtgtgcggaccctttgggaagggcgttcttttcttgtttagaacctaggattctgtttttcccaaacaggatcan

SEQ ID NO: 8314 - protein, 93 aa, Homo sapiens [sequence omitted]

SEQ ID NO: 8315 - DNA, 204 bp, Homo sapiens
gaattctaccccattctaacagtggggagcagatggcaacaggcttctctgatggctggcttgccaaaagtgcttcagggagcataggttcatgctgagtagatttcggtatctctggagctgtcctatctccaccagatttaatcttagcttcttgagacgcaagggggatccccattctttgaacttcacacaaagtcttgc

SEQ ID NO: 8316 - protein, 59 aa, Homo sapiens
MGIPLASQEAKIKSGGDRTAPEIPKSTQHEPMLPEALLASQPSEKPVAICSPLLEWGRI

SEQ ID NO: 8317 - DNA, 382 bp, Homo sapiens
tcgatcccagctcggtgctggcccaggccgacgtcgtgcctccgctgagtgccctggtcgtgaactcgccctgccccgggtgccgttgtcggtacggcaggcacgccgcaccatcggtccgcagccaggcctgtcagcgacctccactcccaccgaggcgatgacatgggccagtgacggcagccaccgagtctgcgcacgacgaaattgaccgtccgctacggtaccgtcactaccgttgatcaccttgacgtcgtcttccagtccggcacagtcagtgccctcatggggcgcaatggagccggcaagtcatcactcatgtgggccctgcagggagcaacaccgtcatcggaaaccgagtcggtactcgatcaggaagctt

SEQ ID NO: 8318 - protein, 68 aa, Homo sapiens
RQPPSLRTTKLTVRYGTVTTVDHLDVVFQSGTVSALMGRNGAGKSSLMWALQGATPSSETESVLDQEA

SEQ ID NO: 8319 - DNA, 482 bp, Homo sapiens
gggtaccattcatctatgcaatcacatacattaatccatatagtcctcaaaacaattccatggaagagtattatgagtctcagtttccaggtgggaaagtgagacacagggaaattaactggcctgcacaaggacacaacactgtgagagacagcttcaaagcagatggtctggctccagcatccaaactcttacctacctctcagtgctgcctctctaaggtctttgtgacaggaatgaagagttggaagagagggtttgcgtaaagatattcagagttgccactacagtaacgggaggcacatgctgtgctaggcagtgctgagagtcaagggagacgggagaacagaatgtttttagttatgttccacagtttagtgactgtctccagtagtgcctgggagaaagatgatggtttgaataacatagagctggggtgtaacaggaaaagaggatggaaggaagcaatgatccaggctagc

SEQ ID NO: 8320 - protein, 68 aa, Homo sapiens [sequence omitted]

SEQ ID NO: 8321 - DNA, 903 bp, Homo sapiens
gaaccggtgagcctggctgtgtatcacctggataacctctgggctgaagagctgtgccagcaaagcccttgagctcatgtgggcatgggggacagtctgaggacaggaggaacagcaaggagacctcaggctgcgctcaggaggcttcggtggcaggtcagattgctcttacaatttggcaaccatcttatgaatattgtgggttaaaagaaataatcagtgtcaccagtagccaagtttttaatgttaaaaaagatgacaatatagaataaaatgaacccctgcagggttccgtggggagtattaccatgagagcatcattctgtgcgtaggctgtgctccctgccagcggtgggcttcccagcaggcggccttggctctgcgtgtgacatgctcagcctgcagcaccgtgtgccctcctgagcagctctgctctggtggatgctctcagcagaaaacacacaacttcgtggtcccctcttctgcccctgggtgggccagggtgcgggtgtgcatcccatgcccaggactgccaggcaggccgcatggtcagccaccagggtcaggtgtcaggcgctgctccagacgcgtgcgtctctgatcttgggcatggctcagcagcctccggcttggccgtgggtggttcctgctcacctgtttctgagtgaccaaccctgaaacttctgggcctaacatgaggcctcatcacctttcccgcatctgtgggctggtgggtggggctctggccccacaggttattcctgcactgccacccgtggtggctgggctggcagccctcaggggccttgctgtcatgggtgtctgctggggtgccacagtttcccccacatggatctctccaggcagagttttatatcctcaccctagagcaaagtttttgga

SEQ ID NO: 8322 - protein, 78 aa, Homo sapiens
MLSAENTQLRGPLFCPWVGQGAGVHPMPRTARQAAWSATRVRCQALLQTRASLILGMAQQPPAWPWVVPAHLFLSDQP

SEQ ID NO: 8323 - DNA, 594 bp, Homo sapiens
  misc_feature (506)..(506): Wherein n may be a, c, g or t
atcctcgttctcgtcgacatcggatcggcaattctctcggccgagatggccttagacctcctcgatgccgatatcgctagcaaggtcaagatctccactgccccgccggtcgagggggctgtagtcgcggccgtcatggcatcgacgggggccgagttggaggtcgtcgccgccgaggcggaaaaagccttggacccgaaagtctcccagctctctaacgattgaacctattagacggtggtgcccggttcgcccaggcaccaccgtttcacattcttagactggccttctgacgaggacggtggctgtcacagctgccagttgaccagatcgtcttcaccaagctcaccgtcgggccacactgcccgcacaacaccagctgccgccagcgccttgcgacagccagaacacggcttatcagtcacgtacgccgtggacccggcagtatcccgagtggcgaagagtaacgcgttcatctcggcatgaatggctatgcagaacccggnggaaccgggcacgtcgtagtcggagaatgccggcacctcgccataatccagccggccccgcgggcaagccccctccagacagtccgga

SEQ ID NO: 8324 - protein, 74 aa, Homo sapiens
ILVLVDIGSAILSAEMALDLLDADIASKVKISTAPPVEGAVVAAVMASTGAELEVVAAEAEKALDPKVSQLSND

SEQ ID NO: 8325 - DNA, 257 bp, Homo sapiens
  misc_feature (257)..(257): Wherein n may be a, c, g or t
gctagcaaatgccttctcagcacccttggctctgagtgccctgagagagtcctcttgccccactgagcttggaagccacatgcaattcccttcacttcagccattgcctcctcaccacctccagcaggtgctcccatgttctcaggatactgcacaccccaggcctctggtctgaacatacactccccaccaaactcactcctccatcttccaccccaatgaatgacacaggctggccatccagagccaggctccgn

SEQ ID NO: 8326 - protein, 59 aa, Homo sapiens
MFRPEAWGVQYPENMGAPAGGGEEAMAEVKGIACGFQAQWGKRTLSGHSEPRVLRRHLL

SEQ ID NO: 8327 - DNA, 364 bp, Homo sapiens
tccggacgctggcgggcttcgtgggcgaaggcaaagtcgatttccaaaagtgactttcctcactcccgtgaagtcggcggaaccctccactaacggcgtctgaacggacggctccgatttgtaaattccaactcctcgaggcctctggaccttgcaccttgaacgacgttttggtggggtcaccaattgctccgtgaatactaaccaggaacttagtcaacattaactcagttaattcactcgtgcacccagggtcagatgccctcgatgagcaggagtttgttacatggcattgtgtatcgttaccttagtccctgaacgagcgcctgcttgtcacctctaagtgtcgcttggtgaggggagg

SEQ ID NO: 8328 - protein, 74 aa, Homo sapiens [sequence omitted]

SEQ ID NO: 8329 - DNA, 333 bp, Homo sapiens
tgctgtcatgggtccagctgcccctcccgctgggggggtggaggcgggtcagggcccacacatcgtgacctctccaaccattcccttaacactgctttgccccctagaggccccaggtcccctggcaccggtcccaagcacagtttgtccactgaggaggaaactctggcagagtaaggaggccgttcgtgtatgtgtgcccctgtgtgtgcgtgtgcaaggaagtgcctgtgtgtgcatgttcgtatgcacgtgtgagtgaggggggcacttgttttgactgtcctgccgggacatctgagcctggtcccacccgctgcacacctcgtgcac

SEQ ID NO: 8330 - protein, 84 aa, Homo sapiens [sequence omitted]

SEQ ID NO: 8331 - DNA, 193 bp, Homo sapiens
ggtaccagttcgcccacggggagcctggacaccatatgaatgactggaagtatgtagttgcaaacacctcgcctcagagtgaagagggggtggaagtggactctcaagcatacagccaccggtggaaaagaaacgtggacccttttaaagctgtagacacaaaccgagccagcatgggccaagactctccgga

SEQ ID NO: 8332 - protein, 52 aa, Homo sapiens
MNDWKYVVANTSPQSEEGVEVDSQAYSHRWKRNVDPFKAVDTNRASMGQDSP

SEQ ID NO: 8333 - DNA, 339 bp, Homo sapiens
aagacgacgctgctagatacgctgcgttcgacgtctgtggctgccggggaggccggtggtattacgcagcacattggtgcatttagtgtacccgtcaagcgcccagaaggtgcgatatccagtgtcacattcctggacacgccgggtcatgcggcgttttcgacgatgcgcagtcgcggctcatccgtcacggacattgtcgtgatggtcgtagcggctgatgacagcgtcatgccgcagacacgcgaagtcatttcactcgtgcgcggtgatgatcggcatgtcccccttgtcgtggcgatcacgaaagtggacgcgccgaaggccgatccacaacgc

SEQ ID NO: 8334 - protein, 113 aa, Homo sapiens
KTTLLDTLRSTSVAAGEAGGITQHIGAFSVPVKRPEGAISSVTFLDTPGHAAFSTMRSRGSSVTDIVVMVVAADDSVMPQTREVISLVRGDDRHVPLVVAITKVDAPKADPQR

SEQ ID NO: 8335 - DNA, 407 bp, Homo sapiens
tgcaccactcggatgcagaccggggtggggcgtccgcagttttcggcagtgttggagtgcgccgaggctgctgctgaggttgatggtgccgtctgggctgacggtggggtgcgtcacccccgcgatgttgctcttgcccttgctgcaggcgccgggtcggtcatgattggctcgtggttcgcgggtacccacgaatcgaccggggccatgcttatcgaccacgatggccggatgtacaaggagtccttcggcatggcctcggctcgcgccgtgcgtcaccgtacccgtgaacgcagtgctttcgagcgagcccgcgccgccctcttcgaggaggggatttcccagtccaagatgtacctggatccccagcgccctggggtcaaggacctggcaattccatactccgg

SEQ ID NO: 8336 - protein, 135 aa, Homo sapiens
CTTRMQTGVGRPQFSAVLECAEAAAEVDGAVWADGGVRHPRDVALALAAGAGSVMIGSWFAGTHESTGAMLIDHDGRMYKESFGMASARAVRHRTRERSAFERARAALFEEGISQSKMYLDPQRPGVKDLAIPYS

SEQ ID NO: 8337 - DNA, 415 bp, Homo sapiens
  misc_feature (62)..(62): Wherein n may be a, c, g or t
  misc_feature (266)..(266): Wherein n may be a, c, g or t
  misc_feature (291)..(291): Wherein n may be a, c, g or t
  misc_feature (397)..(397): Wherein n may be a, c, g or t
agatctgtaggtctgtgataagaacaagtcagggctttcggtttccagcagcagtaccctanagattcacaagatggagctgttacgacatgaaagatcaactaaagagctcgccaagattagctgttaatttcgttaaaacaccaccaaatgaatacattgcttcaagaaagatatagcagatagagctaaaataactaattcaaagtttagaaactatattgaacactttaatagcagtaaatgacaaatatgtatagatcctncaaacagtattacctaataacatanatctacataaattatgggaaggaaaaaaataaacacgaaagaaacatccttcagaaaatggtaagagaattctgctgcgaacaaaagcttgaaggtctggtgcttnttagaaatagctgggtga

SEQ ID NO: 8338 - protein, 57 aa, Homo sapiens
  misc_feature (8)..(8): Wherein Xaa may be any naturally occuring amino acid
  misc_feature (16)..(16): Wherein Xaa may be any naturally occuring amino acid
  misc_feature (52)..(52): Wherein Xaa may be any naturally occuring amino acid
MTNMYRSXKQYYLITXIYINYGKEKNKHERNILQKMVREFCCEQKLEGLVLXRNSWV

SEQ ID NO: 8339 - DNA, 322 bp, Homo sapiens
cgcgccatgggcatggtgatcgcggccgagaaccgccgcggcagcatcatgtacgaaagcgtcgccggcatccgcaccatcaagaccctcgccctggagggaacgcgcaagatcatgtgggacgacgtcaccgcggaggtcacgcgcgcgcgcctgcatgccggacgcgtcggcaacatggcgcagaccgccacgatgccgttcgacctgttcatcaatcgcggcatcatcctggtcggcgcctacatgatcgtgcgctacaacctctccagcggccaggcgggcctcaatatcggtgtcggcgcgctggtggccttcatga

SEQ ID NO: 8340 - protein, 107 aa, Homo sapiens
RAMGMVIAAENRRGSIMYESVAGIRTIKTLALEGTRKIMWDDVTAEVTRARLHAGRVGNMAQTATMPFDLFINRGIILVGAYMIVRYNLSSGQAGLNIGVGALVAFM

SEQ ID NO: 8341 - DNA, 419 bp, Homo sapiens
aaattttggtcctctaaatatgctttgtcttcctgaaatgaaactttggcttaataactagtcccaattctaacagctcactcacttgcatttattaaaacaatctacttctggcagataggatgctaccactttcctttcaaaatgtcagcctcaaactcagttcaaagttgtctttcccagcccctaatacacgttagcccctgtggctctggtgggcgtgtaagtaggggaaaagagagaccatacacttttttcacacctgtttctccctttatttctgactctccttcagaggtatatggaaggctacgtgtctcttgggggtgagggtctcatcctgtttctggtcattattttacttattgattgattggctagtgccacttctcaaaactctacagggtagcaagtgatca

SEQ ID NO: 8342 - protein, 61 aa, Homo sapiens
MSASNSVQSCLSQPLIHVSPCGSGGRVSRGKERPYTFFTPVSPFISDSPSEVYGRLRVSWG

SEQ ID NO: 8343 - DNA, 324 bp, Homo sapiens
aattccatagtcctcatgggcaagagttacacagcgtggaggaccaactcccaggcactcggcctgggcagacacaattattgtcggaatccagatggtgatgccagaccttggtgccatgtgatgaaggaccgaaagctgacgtgggaatactgtgacatgtccccatgctccacctgtggcctgaggcagtgcaaacggcctcagtttagaactaaaggaggactctacacagacatcacctcacacccttggcaggctgccatctttgtcagcaacaagaggtctcctggagagagattcctttgtggaggggtgctgatc

SEQ ID NO: 8344 - protein, 108 aa, Homo sapiens
NSIVLMGKSYTAWRTNSQALGLGRHNYCRNPDGDARPWCHVMKDRKLTWEYCDMSPCSTCGLRQCKRPQFRTKGGLYTDITSHPWQAAIFVSNKRSPGERFLCGGVLI

SEQ ID NO: 8345 - DNA, 296 bp, Homo sapiens
  misc_feature (296)..(296): Wherein n may be a, c, g or t
ccctttacttattacttgctgagcacaggtcctgccaccagttatttcagtctgagcaccgctggagttttgagcccaaccagagagattgacagagagcagattgcagacttctatctgtctgtggttaccaaggattggggtgttcctcaaatgtcttccacaggaactgtgcatatcacagttatagaccaaaatgacaatccttcacagtctcggacggtggagatatttgttaattattatggtaacttgtttcccggtgggattttaggctctgttaagccacaggatgn

SEQ ID NO: 8346 - protein, 98 aa, Homo sapiens
PFTYYLLSTGPATSYFSLSTAGVLSPTREIDREQIADFYLSVVTKDWGVPQMSSTGTVHITVIDQNDNPSQSRTVEIFVNYYGNLFPGGILGSVKPQD

SEQ ID NO: 8347 - DNA, 188 bp, Homo sapiens
tcatgaattgagaatctgagtcttcagaatgtttcttagatgttaactgcctggaaagcagaaacgatgtcttctgttgcttctgtagttttttgcagcatttgtgtccacacagtggaggctcagcaggaatatttgttaatggagatgtggacttaacttcatggaagggaggctttggcatcaaa

SEQ ID NO: 8348 - protein, 61 aa, Homo sapiens [sequence omitted]

SEQ ID NO: 8349 - DNA, 306 bp, Homo sapiens
aattccggagggaagtgtttatccgcagaatacactgaaaaggttggcgaaattgccaagagtcatggcctgaagcttcatatcgatggagctcgcattttcaacgcctctgtggcacttggagttcctgtggacagacttgtgagagctgcagattcagtttcggtatgcatatctaaaggtttaggcgcccccgttggatcagttattgttggctcgaaggccttcatcgacaaggccaaaattctccggaagaccctaaggggtggaatgagacaggttggagttctctgtgctgctgctcat

SEQ ID NO: 8350 - protein, 102 aa, Homo sapiens
NSGGKCLSAEYTEKVGEIAKSHGLKLHIDGARIFNASVALGVPVDRLVRAADSVSVCISKGLGAPVGSVIVGSKAFIDKAKILRKTLRGGMRQVGVLCAAAH

SEQ ID NO: 8351 - DNA, 280 bp, Homo sapiens
acgcgtgaaggggcgggaggaccagggaccgcggtatggccaggccaggcttggaagagcctgggggccgcgcagcatgtgtggcagcagagggccgggcttggaagagcctgggggacaccgtgcagcttgtgtggcagcagagggccgggcttggaagagcctgggggacaccgggcagcttgtgtgggagcagagggttgaacagtgggatgctggtttaaatgagctttcaagaagtttcagaaacaaagccgtgtgcaacttgggtcttcctggg

SEQ ID NO: 8352 - protein, 68 aa, Homo sapiens [sequence omitted]

SEQ ID NO: 8353 - DNA, 259 bp, Homo sapiens
gtcgaccgctaccgcaagggcaaacgacgcctgagcgacctgtgcgcggtttacgacgtggaagtggacgactccctgcacaccgccgaagtggacgcgattgcaacactcgacgtgctggaggccatagtgtcggcccacccggagctggctcgcctgagactcgatgagctcgttccttttcaagcgcaagcccaccgagcctgggccacgtccttcaatgcctggttggcgcataagaacccgggacgcgcaagtg

SEQ ID NO: 8354 - protein, 79 aa, Homo sapiens
MRQPGIEGRGPGSVGLRLKRNELIESQASQLRVGRHYGLQHVECCNRVHFGGVQGVVHFHVVNRAQVAQASFALAVAVD

SEQ ID NO: 8355 - DNA, 291 bp, Homo sapiens
gggccccaacgccagcaccaggcaacattgagcagggaatagtgctggtgaggcatatcactgggcaaaagggtacttttggtacagatttgaaaagctatttctaccttgagatagtttccaaataaaatggaaaaacctggacaaataatgcctggcaccattagcatctggtgtgagctgacagctgaatgaaccagagagtcccaggatgtcagagcacaagaggccctgagaaccatccccagagttcccaaatgctgctctgtagcattttcaaaggtctctaga

SEQ ID NO: 8356 - protein, 80 aa, Homo sapiens [sequence omitted]

SEQ ID NO: 8357 - DNA, 365 bp, Homo sapiens
  misc_feature (1)..(1): Wherein n may be a, c, g or t
  misc_feature (2)..(2): Wherein n may be a, c, g or t
  misc_feature (360)..(360): Wherein n may be a, c, g or t
  misc_feature (365)..(365): Wherein n may be a, c, g or t
nntgatcattgtgggcgcagtgggggcacggttcactggtcgcagggatcagtcgaggatgtaaacgatggggcaaaccgaggtattggtcacagaatcgttgtggcgcggccgcgggtgagatgggggcggcaagcagttgccagttaaggcctgtttagttgacttaagcacactatagtgggtggtatgaatctcaaggagtgggcaggagtgcgcgggatttcgtatcagaccgcgctgcggtggtatcaccgtgggcttatgcctgttcccgtgcatcgagtgggaaggctcgtgcttgttgattgtgacgagcatgggttgccgttcgagggatcgacctttgagccgacgaanacgan

SEQ ID NO: 8358 - protein, 66 aa, Homo sapiens
  misc_feature (65)..(65): Wherein Xaa may be any naturally occuring amino acid
LKHTIVGGMNLKEWAGVRGISYQTALRWYHRGLMPVPVHRVGRLVLVDCDEHGLPFEGSTFEPTXT

SEQ ID NO: 8359 - DNA, 468 bp, Homo sapiens
gatcctaacgcccctaagaggggcttgtcagcttatatgttctttgctaatgaaaacagagacattgtccgttccgagaatcctgacgtaacttttggccaagtaggcagaatattgggtgagaggtggaaggccttaactgctgaagaaaagccaccctatgaatctaaggctcaagcagacaagaagagatacgaatctgaaaaggaattgtacaatgctacacgtgcttgatctaacaactcaatgttctctacctcccatacaacgtacttttgaaacttcagaaagaagttgagtaggttgcattatgtgttattattattactattatcattattttacttatatatccttcttttcttttatgtattctcttcctttttcgcacaacttatgctgattcttcaatatctaattatttagcatttttcttctccatccgacgcaccaaaacgcgaaacgcgt

SEQ ID NO: 8360 - protein, 77 aa, Homo sapiens
DPNAPKRGLSAYMFFANENRDIVRSENPDVTFGQVGRILGERWKALTAEEKPPYESKAQADKKRYESEKELYNATRA

SEQ ID NO: 8361 - DNA, 556 bp, Homo sapiens
cttaagaagaaaagagagaatcagtctcagcagcttgaaaaaccattcgctggaaaggaagatgctttggacggcgagctgaccagtgctccagactgcaacgccaaccccgaagcccacctgccttccatttgcctcaagcaggtgttccccaagtacgcaaaacagttcaactacctgcgcctggtggacaggatggcaaatttgtttatccggttcctgggcatcaaggggacaatgaagttggggccaacaggctttcgtaccttcataaggagctgcaaactcagcagcagcagcctgtccatggctgccgtggacatcctctacattgacatcacacggaggtggaactccatgaccctggaccagcgggactcagggatgtgtctgcaggccttcgtagaagctttctttttcctggctcagaggaagttcaagatgctgccacttcatgagcaggtggcctcactgattgacctttgcgagtaccacctgtccctgctggatgaaaaacgcctggtgtgtggccggggcgtcccggtcgggggccggc

SEQ ID NO: 8362 - protein, 120 aa, Homo sapiens
MANLFIRFLGIKGTMKLGPTGFRTFIRSCKLSSSSLSMAAVDILYIDITRRWNSMTLDQRDSGMCLQAFVEAFFFLAQRKFKMLPLHEQVASLIDLCEYHLSLLDEKRLVCGRGVPVGGR

SEQ ID NO: 8363 - DNA, 325 bp, Homo sapiens
  misc_feature (1)..(1): Wherein n may be a, c, g or t
ntctacacacatccacccacgtatgcacacaccatctccatcctatctacacacatccacacacatatccacacaccatctccatctccatcccatctacacacagggtcgagcgctctcaagatccatccccaggcatagtctcctcattcctgctggtttctgttcgccatgtctcagccccaccggcagtaacttatcccctccatgagcagggctctcccttcccaggttgcccaggctgagactggacactagttaagcgcttggcagacagaaaggccgttcttaagagggcaagtgtagttttgctaggcatgggccc

SEQ ID NO: 8364 - protein, 62 aa, Homo sapiens
MHTPSPSYLHTSTHISTHHLHLHPIYTQGRALSRSIPRHSLLIPAGFCSPCLSPTGSNLSPP

SEQ ID NO: 8365 - DNA, 252 bp, Homo sapiens
  misc_feature (1)..(1): Wherein n may be a, c, g or t
  misc_feature (2)..(2): Wherein n may be a, c, g or t
nngattgggcctggcgggaggggcggggcccgaggcccacctgactcggcgggcgccggctctgctcccgaagctgctccgtctcctcgtacagagcgcgcacctccctctcgtgctcgctctcgcgcctccgcagcgcctgctccaggccgtcgcgctcccgggccgcctcctccaggcaggccgacgcgcgtatcagaacatcctcgaaagagcccagcagctcggggcgctcgcgctgcagcctggccc

SEQ ID NO: 8366 - protein, 84 aa, Homo sapiens
  misc_feature (1)..(1): Wherein Xaa may be any naturally occuring amino acid
XIGPGGRGGARGPPDSAGAGSAPEAAPSPRTERAPPSRARSRASAAPAPGRRAPGPPPPGRPTRVSEHPRKSPAARGARAAAWP

SEQ ID NO: 8367 - DNA, 166 bp, Homo sapiens
ttcggcgcttacattgcttactactgcaaccacccgctgtacaccccagtgagtgatctgcagataaagattgggtttggttttggggtcgtctgccaggtcgcgaacttctactgccacatcctgctgcggaacctcaggagcccaagcggcagcggcgggtacc

SEQ ID NO: 8368 - protein, 55 aa, Homo sapiens
FGAYIAYYCNHPLYTPVSDLQIKIGFGFGVVCQVANFYCHILLRNLRSPSGSGGY

SEQ ID NO: 8369 - DNA, 303 bp, Homo sapiens
acgcgtcggagtgcgccgacagcagaatttccgcttccgcgccttgcttgttttaacagatcacaggaggcgtcgcatggctgctcggtctccaactgtgtgggtccgcaccgtcaatcgccgcggcgatcgtctctgggtagagggaccgtcccgactaccgaagcggcgggaaacctccagcgttattgtttcgttccagaagcagacgagtgccagaagcaagcctctcttcctttcattgacttaccgatgtagccttgatgctggtcaaagcagtcctctccgtgcgggcacagcgtt

SEQ ID NO: 8370 - protein, 75 aa, Homo sapiens
MAARSPTVWVRTVNRRGDRLWVEGPSRLPKRRETSSVIVSFQKQTSARSKPLFLSLTYRCSLDAGQSSPLRAGTA

SEQ ID NO: 8371 - DNA, 303 bp, Homo sapiens
  misc_feature (154)..(154): Wherein n may be a, c, g or t
cgtcagccggtgggtgtcgtcgcgggtatctgcccgttcaacttcccagccatggtcccgatgtggatgcacccgctggccgttgctactggaaatgccttcattcttaagccagcatcgcctacgccgtccgcttcgctcctcaccgcggacntctacaaagaggccgggcttcccgacggcgtctttaacgtgctttcgggggaccgccgcagtgttcaggacatcctggttcacccgggtatcgacgctatttcgtttgttggttcgacgccagtggctcacattgtccaagacaccggt

SEQ ID NO: 8372 - protein, 101 aa, Homo sapiens
  misc_feature (52)..(52): Wherein Xaa may be any naturally occuring amino acid
RQPVGVVAGICPFNFPAMVPMWMHPLAVATGNAFILKPASPTPSASLLTADXYKEAGLPDGVFNVLSGDRRSVQDILVHPGIDAISFVGSTPVAHIVQDTG

SEQ ID NO: 8373 - DNA, 374 bp, Homo sapiens
  misc_feature (1)..(1): Wherein n may be a, c, g or t
nattgttcaaaacattaaaaaaatttgagttatttccatggggctttttgggtagacaagcataaaaggggtagagtagaaattcttctctccccatgactacatggatttgtgctttttgcttcctctctgtctcagcagcactttgaagacacatgacctgctttccgagattagagacatgtgatgataatatgcgtgattactcttttacgacagagctgttttctgtcaataactcatttctatcaaaataaatgtatccgagggatgaattgttttaaagtctacttatagtattgtatgtgtttgtttttcacagcatgttaatataaaactagaacctagtatattttttgagacagggtattgct

SEQ ID NO: 8374 - protein, 52 aa, Homo sapiens
MCLQSAAETERKQKAQIHVVMGREEFLLYPFYACLPKKPHGNNSNFFNVLNN

SEQ ID NO: 8375 - DNA, 289 bp, Homo sapiens
  misc_feature (1)..(1): Wherein n may be a, c, g or t
nagatgtgagcaacgtttgactctgaatctctgtacttggagttctcaaaccaggcagcagagtggccgtggaccctcggatggtggcctagtgcaacccctttcctcaaaataaacccatgaaccctggaacttctggtcccactcgcctctcccttcttccggccttcctggaaaactgattaacaatctggccttcataaaaagggttttacaagtttttttttcccactccctcctccccctggcctcttcctacctcctcctttaacttcaggtaaaacttggg

SEQ ID NO: 8376 - protein, 51 aa, Homo sapiens
MKARLLISFPGRPEEGRGEWDQKFQGSWVYFEERGCTRPPSEGPRPLCCLV

SEQ ID NO: 8377 - DNA, 281 bp, Homo sapiens
  misc_feature (1)..(1): Wherein n may be a, c, g or t
  misc_feature (2)..(2): Wherein n may be a, c, g or t
nnactagtgaagagtagctagcacgatgaaataagtgccggagctgatcgaatccctagtctcggttcgcctgaaacagagagaagtcgattactgtacaccgtgcctccttctatgtacaagctacaagtggtcttggtgcctccgagtcttcaggcgacgatgccaatacagtttggctacggaccaaccatcgccgaatcttctcaattgttgccaaacagaactaatatggcgcaaagcgccgcagatgcctctttgcagtatgctaatctggatcc

SEQ ID NO: 8378 - protein, 55 aa, Homo sapiens
MYKLQVVLVPPSLQATMPIQFGYGPTIAESSQLLPNRTNMAQSAADASLQYANLD

SEQ ID NO: 8379 - DNA, 270 bp, Homo sapiens
ccggaccctgctgatccagccaaagaactagaattgaacttttctagaccatggaagagaatcaacatgattgaagaattagaaaaggtattcaacgttaagttcccatctggtgatcaattacatacagctgagactggtgaatttttgaaaaagattcttgtcgacaacaaattagaatgtccacctccactaactaatgctcgtatgttagataagcttgtcggtgaattagaagatacatgtatcaacccaactttcatttttggc

SEQ ID NO: 8380 - protein, 90 aa, Homo sapiens
PDPADPAKELELNFSRPWKRINMIEELEKVFNVKFPSGDQLHTAETGEFLKKILVDNKLECPPPLTNARMLDKLVGELEDTCINPTFIFG

SEQ ID NO: 8381 - DNA, 354 bp, Homo sapiens
aagcttcataaccaataggctgtgtggatctgggggaatgaagtggcttttctgaaccccaattgacccatctgacatgtggaaacaatatagctcctcccaccccctcaggactattgggggtattaaaggagccagagtctaaaataacattaaaaatactgatggctacacaaagcaaggcaacgcagccactcagagccatcgtctctttcttgagggcagagacgtggctttctcatgttttgtattccccaaagcacctggtacaacccatggcaggtgggcaatcaatacttgctgaatggatgaaatagaaaacatggtccctgtctctgtggaattaaagatcta

SEQ ID NO: 8382 - protein, 68 aa, Homo sapiens [sequence omitted]

SEQ ID NO: 8383 - DNA, 250 bp, Homo sapiens
cttgacgcccccgtcgaatctatagacagggtgctggggatcaacctgcgcgggccctacttcctcacccaggccgtcgcccgtcagctcatcgcccaacggggtgccggcaccaccgacaccactgacgggatcgtcggggctatcgtcaacgtggcttcctgctcctcgacgatggtcagcttcaaccgcggcgagtactgcatctccaaggctggggtctcgatggcaacccagctctgggccgcgg

SEQ ID NO: 8384 - protein, 83 aa, Homo sapiens
LDAPVESIDRVLGINLRGPYFLTQAVARQLIAQRGAGTTDTTDGIVGAIVNVASCSSTMVSFNRGEYCISKAGVSMATQLWAA

SEQ ID NO: 8385 - DNA, 366 bp, Homo sapiens
gaattctatcaagctgttcatcatgctgagcaaaccttcagaaagatggaaagttatttgaagcagcagcaactttgtgatgttatcctgattgttgggaaccgaaagatacctgcacataggcttgttctgagttcagtctccgactattttgcggccatgtttacaagtgatgtttgtgaagccaagcaagaggagatcaaaatggaaggcatagaccccaatgctctctgggaccttgtccaatttgaatatacaggctgcttggaattaaaagaggacaccattgagaaccttcttgctgcagcgtgccttcttcagcttccacaggtggtggaagtgtgctgccacttcctcatgaagctt

SEQ ID NO: 8386 - protein, 122 aa, Homo sapiens
EFYQAVHHAEQTFRKMESYLKQQQLCDVILIVGNRKIPAHRLVLSSVSDYFAAMFTSDVCEAKQEEIKMEGIDPNALWDLVQFEYTGCLELKEDTIENLLAAACLLQLPQVVEVCCHFLMKL

SEQ ID NO: 8387 - DNA, 240 bp, Homo sapiens
tgatcacatagcttcacacagcgtcagtgggacaagctcatggagcatggagtgaaaccttgcggcttaggctgtcgcgacacattacgcttcgaggtaggtctgcctctttatggcgatgaactgacagacgaactgacaccgcttgaagccggactgggattctttgcaaaattagacaaagaaaattttatcggcaaggacgcattggtaaagcagaaaaccgagggactgacgcgt

SEQ ID NO: 8388 - protein, 79 aa, Homo sapiens
SHSFTQRQWDKLMEHGVKPCGLGCRDTLRFEVGLPLYGDELTDELTPLEAGLGFFAKLDKENFIGKDALVKQKTEGLTR

SEQ ID NO: 8389 - DNA, 298 bp, Homo sapiens
agatctctgtgcccgggacaattcatctgaccccagaaaataccttggctccttctacacggactccctggttcatgatcctctgtctctcaagctattgacagatgttatagggaaggatagagttattctgggaactgattacccctttccactaggtgagcaggagcctgggaagttgatagagtctatggcagactttgatgaagaaacaaaagataaacttacagctggcaatgccttgacttttttggggtcttgagagaaaactatttgaatgacagaatttaccatgaga

SEQ ID NO: 8390 - protein, 50 aa, Homo sapiens
MVNSVIQIVFSQDPKKVKALPAVSLSFVSSSKSAIDSINFPGSCSPSGKG

SEQ ID NO: 8391 - DNA, 540 bp, Homo sapiens
  misc_feature (1)..(1): Wherein n may be a, c, g or t
  misc_feature (2)..(2): Wherein n may be a, c, g or t
nntgtacagccatccccacaacccagttttagaacatgcccatcaccccagaaagggccctgcgccttgcctgcaggcaccccaaaaccaagccctgctcccaaccctgacaactgctcatcgacttctggtctccacagattgcattttctggatgtttcacacaaacagaaccatacactgtgcgttttcttgcgtgggggcatgcagtcttccagcctcaccacattgtggcctgcctaactctccgctcctcactgctgaccacacccaaacacgcactggccacgtcacgtgtattttccacagggagggcggcatgcacttcccctgtaggactggctgagccacgctgctggctctgcagcaggccgaacttgcaaccccagccctcccaaggcagtgagagcaactatgggcagcacctacggcagggacagattggcgtctcgctcacactgtacgcatgaagcgggtatggccagcggctcacactgtacatgtgaagcgggtatggccagcggctcacactgtacgcgt

SEQ ID NO: 8392 - protein, 80 aa, Homo sapiens
  misc_feature (1)..(1): Wherein Xaa may be any naturally occuring amino acid
XVQPSPQPSFRTCPSPQKGPCALPAGTPKPSPAPNPDNCSSTSGLHRLHFLDVSHKQNHTLCVFLRGGMQSSSLTTLWPA

SEQ ID NO: 8393 - DNA, 613 bp, Homo sapiens
acgcgttgttctaagtgaactcattcgatcctctctccctccttggaggtggggatggcttttggacctattttacagacagtgaactgctggctgaacagcgagaagacggacagcacatcgtgaggtcactcaacgccaagaattatcatgacactgtggaacttcactgctccagggtccaaaccaatggcgtaaaacgcaatttgacgttttgtatcatgtgaattacgctttactgcggcaaaaccagttcatgattttaacaaagttaaaatcttctgcaacctccccttttctagcagaccacacaggcctgctgcgaagccaactgtgcacagggctcccggagaaggtccgcctgccccggtcacgggccagcctcgatctgccagcaggggtcgcgggccagcaggggtgggccagcctcgatctgctcggagacatcgagtccagataagcagcctatgtggactgtgcgcttgggaagagcctggccctgtcgaccctgagaatggaagcggaagccaggctcgtggacgcagcaacgtgacactgggaaggaggcacagtaggcggcctcacgctgacctggcctaacaaggagggatcc

SEQ ID NO: 8394 - protein, 72 aa, Homo sapiens
MSPSRSRLAHPCWPATPAGRSRLARDRGRRTFSGSPVHSWLRSRPVWSARKGEVAEDFNFVKIMNWFCRSKA

SEQ ID NO: 8395 - DNA, 351 bp, Homo sapiens
acgcgtaaggatcccgagggctgggtgccgattgagacgctggcgtcgttcaagcgcatgcgcccgatgcgtgaggtgctgaactcaggacatggccgaggcgttcgcaagtctgagtcgctgcttgaagtcgatgctgagggcctgcgtgtgcggcgcaaggcagagctcaagcctgtcacagacgcgcatacacgcagcatttacgccaagggctttcctgatgagtacgagggcttgcaagaggagctcgaggcattctttgcgcagtttggcaagatcaacggcgtccgaatgcgccgcgaaaatgaaaagccgcgcaggttcaagaacagtgtatttgttgaattc

SEQ ID NO: 8396 - protein, 117 aa, Homo sapiens
TRKDPEGWVPIETLASFKRMRPMREVLNSGHGRGVRKSESLLEVDAEGLRVRRKAELKPVTDAHTRSIYAKGFPDEYEGLQEELEAFFAQFGKINGVRMRRENEKPRRFKNSVFVEF

SEQ ID NO: 8397 - DNA, 222 bp, Homo sapiens
  misc_feature (1)..(1): Wherein n may be a, c, g or t
nattgtgctggtgctcgcccggagacgggtgagcgcttcggtgtcccggtggacgaggtgctgcgcacccagttgcgtcgcgccgaccgttccagcgccggatcccgcacgaaggcgagcccccgtgacatccaggcgcagatccgtgccgggctgtccgccgaggagaccgccgcggtgctcggcctctccgtcgacgatgtggtgcgtttcgaggcaccg

SEQ ID NO: 8398 - protein, 74 aa, Homo sapiens
  misc_feature (1)..(1): Wherein Xaa may be any naturally occuring amino acid
XCAGARPETGERFGVPVDEVLRTQLRRADRSSAGSRTKASPRDIQAQIRAGLSAEETAAVLGLSVDDVVRFEAP

SEQ ID NO: 8399 - DNA, 477 bp, Homo sapiens
  misc_feature (1)..(1): Wherein n may be a, c, g or t
  misc_feature (2)..(2): Wherein n may be a, c, g or t
nnacgcgtcgctgtgggcagcaacaatgccgtggtcgaagggcttgcccagagccaatcacggatcgaagttcgccagtccggcgtgttgattcacagcacgctggtgccggaaggtcccttccggctaacgggattgccattgctcaatggcaccagtgacctggaggtcagcgtgatcgacgtgcggggtgccaggcgcagctttgtggtgccggcggcctgtaacctcagcctggccggcagcggtatcatcgattacggcacgattcgctcgggcgaattgtcccagactgcattcaatccgcgcgaagagaggagcacttccctgatcgtcaattgtggcacgacgctgcccaggttcggcatcacctttaccgatctgcaagcaggcagcaaggtgccgggcatcctgggtgccggctttactgaagcgcagaatttcgggttgggggctgtaggcgcccgtcgcaccggt

SEQ ID NO: 8400 - protein, 159 aa, Homo sapiens
  misc_feature (1)..(1): Wherein Xaa may be any naturally occuring amino acid
XRVAVGSNNAVVEGLAQSQSRIEVRQSGVLIHSTLVPEGPFRLTGLPLLNGTSDLEVSVIDVRGARRSFVVPAACNLSLAGSGIIDYGTIRSGELSQTAFNPREERSTSLIVNCGTTLPRFGITFTDLQAGSKVPGILGAGFTEAQNFGLGAVGARRTG

SEQ ID NO: 8401 - DNA, 409 bp, Homo sapiens
  misc_feature (1)..(1): Wherein n may be a, c, g or t
ngaatatccatgcagcccggtgagtagaaaatcgggcgcgttggcagcccatggagccgactataatcacatttggctctggcaatcagagccatttcaataaatattcaggagccaatcatgcgtgctagcgtgctgtcggactggctggcgcagcgcctcgtgcgcggcggcgaacagccgatctaccggcagcttcaccggctgctgcaacaggcgatcctgtcgcgcgaactgccggccggcacgcgcgtgccgtcgtcgcggctgctggccaccgagctcggcatcgcgcgcaacacggtcacgcaggtttacgaacagctttcgctcgaaggctatgtgaactcggcgacgggtcgcggcacgttcgtcgccgacagcgcgccggacgagatcgtcggcgcgc

SEQ ID NO: 8402 - protein, 96 aa, Homo sapiens
MRASVLSDWLAQRLVRGGEQPIYRQLHRLLQQAILSRELPAGTRVPSSRLLATELGIARNTVTQVYEQLSLEGYVNSATGRGTFVADSAPDEIVGA

SEQ ID NO: 8403 - DNA, 317 bp, Homo sapiens
aaatttactccttcattcaatcatgcagcaaatgtttactgagcacctactctgtgccaggcatccttctggtgctacagagacagtggagagcaagatggacaaggtcttggctctcgtgagtcttacatcctcgtggtggagacagataataaatgagtgagtcaatacagaatcaagatagttgctgcggtagaaaaaataacggcctccgcctcccaagccctccttatccctggaacctgtggctgttatgtaccatggcctgagggagataaggttgctcatgtgctggcctcgaagttgggagaggatcc

SEQ ID NO: 8404 - protein, 91 aa, Homo sapiens [sequence omitted]

SEQ ID NO: 8405 - DNA, 524 bp, Homo sapiens
cgatcgtcgccgcggtgattggacgactccgtcccctggaacctcgtctgctgggcagggagaatccagacaccctcactagcgtcctgcatgccgtcggcgaaaccctgttttggacagccctggtgtggacgctaacagagcttgttcgcgccaccttgtgctcgccgcatcgggatgtcgtcgattccacccgcacccgcggacgccgggcatggttagccgcacagatgtgggttgcactggccctgctcatgatccccctggaatccgctgattccgccggtttgaccgtcgagcaggcgttcctcgatctcccgacctacatcacctcaaccccatttgtaacggctgggttggtcgtcccagtcttggggctgctggtcggcctgcttgctctactgagcacccatctcggcggcctcgtagtggcaagcttaatgacggtcctggccgcattgccggttcccgtcaccggggcaatttcggtgggccttaaccacgatttcgccaccgactccgga

SEQ ID NO: 8406 - protein, 98 aa, Homo sapiens
MWVALALLMIPLESADSAGLTVEQAFLDLPTYITSTPFVTAGLVVPVLGLLVGLLALLSTHLGGLVVASLMTVLAALPVPVTGAISVGLNHDFATDSG

SEQ ID NO: 8407 - DNA, 348 bp, Homo sapiens
  misc_feature (1)..(1): Wherein n may be a, c, g or t
ntttccgcacgggacaacccaagtgacaggtaattttccccaaatcagttcagggcccctatcaaatctcaataccaatttctctagtctccatgtctccattcctttatggtaaaactgaatcttcggaatcggatgctggattttgttttggagcaattcatatatgtacatgtatgatctgttgaaccgaaagtattgagtaatgagtaatgactctgtaaacaccacctatgctcctgataatatgtcaacatatttggtatactgctctgtgtaatttgtcctctgaatattctaaaattgggttctgtgtttgtagttttgaaagaacttcagattggaaag

SEQ ID NO: 8408 - protein, 58 aa, Homo sapiens
  misc_feature (58)..(58): Wherein Xaa may be any naturally occuring amino acid
MYIYELLQNKIQHPIPKIQFYHKGMETWRLEKLVLRFDRGPELIWGKLPVTWVVPCGX

SEQ ID NO: 8409 - DNA, 196 bp, Homo sapiens
  misc_feature (1)..(1): Wherein n may be a, c, g or t
  misc_feature (2)..(2): Wherein n may be a, c, g or t
nnctccagggggtcctacggtacccagcctggacattatggacagggtggtgtccccccgaatgtggatcctgaggcctactcctggttccagtctgtggatgccgatcacagtggctatatctccctcaaggagctgaagcaggccctagtcaactccaactggtcgtcattcaatgacgagacatgcctcatga

SEQ ID NO: 8410 - protein, 65 aa, Homo sapiens
  misc_feature (1)..(1): Wherein Xaa may be any naturally occuring amino acid
XSRGSYGTQPGHYGQGGVPPNVDPEAYSWFQSVDADHSGYISLKELKQALVNSNWSSFNDETCLM

SEQ ID NO: 8411 - DNA, 438 bp, Homo sapiens
cctaggtttcctctatcaagctatgagttctttaagggcagcagctagtcctgattctttttgcggtcacctaagtctggcccaggatcactagattctccctaaaatgtatacatttccctgttcctgggaggactgggaatggaaatgggaaaatgctttttggaccttgtatgtatacgcttggtcagaagcccctggctgcagtaagacatttgtgggttctgctggttctggtaaggccttaggctgtgagtggttcagaaaggtctagctccggtctggtgggcagatgtgcctgggtaactgagcaggcaggcaggtacccactcacccacctgtgagccccaccataatctgagacttcatttaaagggggcaggcagcatggtttttcttacagcattaagagtgtggattctggcatagattgcctgg

SEQ ID NO: 8412 - protein, 55 aa, Homo sapiens
MYTFPCSWEDWEWKWENAFWTLYVYAWSEAPGCSKTFVGSAGSGKALGCEWFRKV

SEQ ID NO: 8413 - DNA, 272 bp, Homo sapiens
gctagctctcataactaaaatgcccagcctggggctggcagcccataaaaagtgtaggcaatttcccactgtgccttgggccaagctttctcctttagccgaaggaattttccaagctgaaggatgttttgcctccctgcccccctttttacttcaactttctaacctctctgagccttggcttccttatttgtaaaatggggctaataatagtagcaacctcagagagctgtggggtataaatgggacagtataacataacacagggtacc

SEQ ID NO: 8414 - protein, 58 aa, Homo sapiens
MPSLGLAAHKKCRQFPTVPWAKLSPLAEGIFQAEGCFASLPPFLLQLSNLSEPWLPYL

SEQ ID NO: 8415 - DNA, 385 bp, Homo sapiens
aaatttgtttaatatagttgctgcctcagcattcatccttaggcttgacataagtttctgaaatgcctctcacccttggcatagttaaaacttctccttgctgtgtggctgtttgccatatggcctgcttcttcctcatctcattgacccaaagcccacaacattccaaactgcagatcataataaaacctaacagtcaacaccagagtcatacaaataagtttcccctttcactcctgttttctttaacttagccaatctacaatctacaacccccaagggaaagataatgcccatgaaccttaataaaggcacagtcccacaggtccttcctccctttttctttccttctctcttactcccctatcctctggttgagctccct

SEQ ID NO: 8416 - protein, 63 aa, Homo sapiens
MPLTLGIVKTSPCCVAVCHMACFFLISLTQSPQHSKLQIIIKPNSQHQSHTNKFPLSLLFSLT

SEQ ID NO: 8417 - DNA, 343 bp, Homo sapiens
  misc_feature (136)..(136): Wherein n may be a, c, g or t
acgcgtccgaggcgagatcgcccccgcgcagtgcgccgatcgcccgggtcacgtcgtcggcgagggattcgacgagcgcggcgtgatgcctcagcctgtcgaagtcgagcgcgatctcgtcgcccatcacgtcgtncctctccacggggggcgcggatgccgcggcgcgaagctcgctgacgatcgggtcgtcgtcaccgagcaaccgggacacgcgccgcagcgccttctcctgcacgtcgtcctgggcgaccgcgatcaccgcgaggatctcctgggtgagccgtcgcgcaccgcgcgcaacggcctgatcgccgaggcggaggccggtcacccgaccggt

SEQ ID NO: 8418 - protein, 59 aa, Homo sapiens
  misc_feature (46)..(46): Wherein Xaa may be any naturally occuring amino acid
TRPRRDRPRAVRRSPGSRRRRGIRRARRDASACRSRARSRRPSRRXSPRGARMPRREAR

SEQ ID NO: 8419 - DNA, 277 bp, Homo sapiens
tctagaaaagtcaaaaatgaaacagcgtgcttgggccaagcaaaacacctaagacttgtccattgcccgggctgggccagccctgagcctgccccctctcgccttcagtctttcctctgcctctgtggctcctttgttttccttcaggaaacacgattcgtctcgtgggtgacaggaaagggagggaaattggcaggacagaagtcagttgctctttcattggcatcttggtcaaagtttcttttgcaaagctccctccaggcttcccagaaccaca

SEQ ID NO: 8420 - protein, 71 aa, Homo sapiens
MPMKEQLTSVLPISLPFLSPTRRIVFPEGKQRSHRGRGKTEGERGQAQGWPSPGNGQVLGVLLGPSTLFHF

SEQ ID NO: 8421 - DNA, 405 bp, Homo sapiens
ctcgaggacgtctcgttggtcgtgcggcctggcgagatcgtcggcatttccgggttgctgggctcggggcggacggaactggccctcgccctgttcggcatgcggccgtcctatcgcggcaccatccgcatcgatggcagggaggttcggctcggcagcgtaccggcggcgatcacgcacgggatcgcctatgtgccggaggaccgtctgaccgaggggctgtttctgcccgagacgatcaatcgcaacatcatcgccacctcgctcggtcggctgagccggttcggcatcctgcgtgaaggcccggcggcggaggcagccgcacgcaccatccgcgagatggcgatcgcgacacccaccggcgagcgcccggtgatgcagctctcgggcggcaacgcgcaacgc

SEQ ID NO: 8422 - protein, 135 aa, Homo sapiens
LEDVSLVVRPGEIVGISGLLGSGRTELALALFGMRPSYRGTIRIDGREVRLGSVPAAITHGIAYVPEDRLTEGLFLPETINRNIIATSLGRLSRFGILREGPAAEAAARTIREMAIATPTGERPVMQLSGGNAQR

SEQ ID NO: 8423 - DNA, 274 bp, Homo sapiens
attctttatatcattcgtccaaatattgaagaagaagctaaaaacgctttggtagcacgttttgactctattttgactgacaacggtgcaactgttgttgaatcaaaatcttgggaaaaacgtcgtcttgcatacgaaatccaagatttccgtgaaggactttaccacatcgttaacgttgaagcaaacgacgacgtagctcttaaagagtttgaccgtctttcaaaaatcaacgctgacattcttcgtcacatgatcgtcaaaactgacgcgt

SEQ ID NO: 8424 - protein, 91 aa, Homo sapiens
ILYIIRPNIEEEAKNALVARFDSILTDNGATVVESKSWEKRRLAYEIQDFREGLYHIVNVEANDDVALKEFDRLSKINADILRHMIVKTDA

SEQ ID NO: 8425 - DNA, 292 bp, Homo sapiens
tccggagttaaagggagccctggaggctgagtctgtcaggcacaccacacccactgggcaacgtgaagaccccggtggcaccggcccagcagcggaatgaaagccatccaccttcagcaccgcagtcccaccagctacagggtcaaggccagggcatcctatgtggatgagaccctgtttggcagcccagcaagaaccagacctgcccaaccagactttgacccaccctgggtgcagaattgtaaccgatccagaggagtgggcccaggaccaccgaagggctctctggcca

SEQ ID NO: 8426 - protein, 65 aa, Homo sapiens
MKAIHLQHRSPTSYRVKARASYVDETLFGSPARTRPAQPDFDPPWVQNCNRSRGVGPGPPKGSLA

SEQ ID NO: 8427 - DNA, 186 bp, Homo sapiens
  misc_feature (1)..(1): Wherein n may be a, c, g or t
  misc_feature (2)..(2): Wherein n may be a, c, g or t
nnaagctttactcatgaacaagactctcacgggaatagcagtgtaataaaaagaggggatggcaaaggacttagtgcttcagcaccacagacagctgcgaagaaaagagggagcagcaatggatgcacagcagctcagccacggacgaagagcgcccctcccaccctggctcaagctcaaggatcc

SEQ ID NO: 8428 - protein, 62 aa, Homo sapiens
  misc_feature (1)..(1): Wherein Xaa may be any naturally occuring amino acid
XSFTHEQDSHGNSSVIKRGDGKGLSASAPQTAAKKRGSSNGCTAAQPRTKSAPPTLAQAQGS

SEQ ID NO: 8429 - DNA, 265 bp, Homo sapiens
acgcgtcagtgtcagcttcatctagatggccgtactgtgccagggacgcccctgcttattggaaacgcatgcctgggcatgggggctgggggctccggtggggcgtcaggtggacgagtcctcacaggctctggcagatgttcccgcatctccttgggaacttttctatgaagtgcggggctgttccaaaatttacaatgtctatcaaaagaaaatttcaaagtttgtctagcctttcctaaaataaacgttttagagcaaactt

SEQ ID NO: 8430 - protein, 68 aa, Homo sapiens
MAVLCQGRPCLLETHAWAWGLGAPVGRQVDESSQALADVPASPWELFYEVRGCSKIYNVYQKKISKFV

SEQ ID NO: 8431 - DNA, 549 bp, Homo sapiens
tccggaaaaccttggccacccaaccaaccaggcgccccttagcgctgcgcacatttgcggctatcatcaacccaaaacaactctgacaaggtctttcgcacgtgtggcaatcgggttcacgactgctggccatgcggcacgcgatggcaacccatttcagaggcaacatgtccgccacgacatggtcctcggacgcgattaagatgccccgcatggctgttttcattggcgaaacccattatgatcccgcccattccgaggagcgcatggctgcgcgcccggccccatctggagaacttgatgttcatgcgcgagccgtggccagtttgccaatgccggcccgttagccgacggaaagcggggcggtgctcatctataccgtgcctgaccgtgacgtcctcaaccatttattggaggccgacccttatcccaagacggccgtcaaagtaacctcgtttgcgagtggaagccgaattaccaccatcacgtctgaggccggcggcagcagagggctcgggggttgaaacacgtgatgttatggagtcatga

SEQ ID NO: 8432 - protein, 96 aa, Homo sapiens
MVEDVTVRHGIDEHRPAFRRLTGRHWQTGHGSRMNIKFSRWGRARSHALLGMGGIIMGFANENSHAGHLNRVRGPCRGGHVASEMGCHRVPHGQQS

SEQ ID NO: 8433 - DNA, 373 bp, Homo sapiens
cccgggcactgatgctgaccttccaggctacctacgcaggtgtcggggccaacaagcacctgcaggagctggcccaggaggaggtgaagcagcatgcccaggaactctgggctgcctacaggtgggctcggtggcaaacgggacagctactgccctgtgacactagtgtgccctttccaggcatcagttctgccttgcatttgggaggaatgccaagtgtctgattcaacaatgaaccagaggcttggtcagtgtgcagctgctgagcaaaagggttagagggtggggaggtgagagcaaaggcccagctgcagccctcagctagagtccaagacccaaccaggcgctgggctgactctgaccccaggtgcac

SEQ ID NO: 8434 - protein, 70 aa, Homo sapiens [sequence omitted]

SEQ ID NO: 8435 - DNA, 291 bp, Homo sapiens
atcctggaaaccctaaagctactgggcgccggtcaatggatgagttttggttccctgacccgcgattgcacggtttctatgcaagttgtgggccgtttcttggctcttttggagttgtacaaagccaaggcggtggacgcacaacaggaagaagcgctgggccagttggacctttcgtggacgggtttggacgttgacccagcggtagttgccgccgcgaactgggactaaggacgctgctggataaacttcagcgtctcgggtgtcagctcgcggtcagaataaacgcgt

SEQ ID NO: 8436 - protein, 76 aa, Homo sapiens
ILETLKLLGAGQWMSFGSLTRDCTVSMQVVGRFLALLELYKAKAVDAQQEEALGQLDLSWTGLDVDPAVVAAANWD

SEQ ID NO: 8437 - DNA, 310 bp, Homo sapiens
acgcgtgaaggggaatgaaagggtttttcctggatcaaaatgatgcttgtggcagacacagttggaaccacagacgatgccacgcttgtgtcagcagtgcgacactggcccacgtggcgtccttggtctctcctcattgctgccgtcactgtgtgctgggcatgccctgcagttaccccaaagctttatgtcacaacattgaggctggcggagaaagaccggccccttcaccccaccttagacttcctggaagggccgcccgggtccacaacctggcccgttaactccctgggcagctgctgggggagaa

SEQ ID NO: 8438 - protein, 90 aa, Homo sapiens [sequence omitted]

SEQ ID NO: 8439 - DNA, 299 bp, Homo sapiens
gaattcactctgtgatacaggtttgatgcaaagagcatttctactcacagatcacatgaggtatacagtttgtgtgcagtgatatgtcacagctttttatttatatggcctgctcagtctattctgctccttctactgccatggaaagtgcatcgttttcctccctctatcttcctttccacatatcatcagcaccacccactatgttctgcccattaagtcctctgtgtgctagaaaaccccaacagtgattaaatgctgataaaagaatgttagaaggttaagatatcaaccgatcg

SEQ ID NO: 8440 - protein, 55 aa, Homo sapiens
MSQLFIYMACSVYSAPSTAMESASFSSLYLPFHISSAPPTMFCPLSPLCARKPQQ

SEQ ID NO: 8441 - DNA, 402 bp, Homo sapiens
agatctctggcggggagtagggtgcaaggcagccaggtctccgatcctttccgcagcatggggaagcacaggctccggagcctggccctgctgccactgctgctgcggctgctgctgctgctgctgcccaccgatgcctcagctccacaaaaaccaatctacatggtgatggttccctccctgctccacgcaggaacccccgagaaggcctgcttcctgttcagccatctaaacgagacagtggctgtgagagtgtccttggagtctgtccatgggaaccaaagcctcttcactgaccttgtagttgacaaggacctattccactgtacctccttcaccgtcccacagtcttcatctgatgagctgatgtttttcactgtccaagtaaaaggagcaactcat

SEQ ID NO: 8442 - protein, 115 aa, Homo sapiens
MGKHRLRSLALLPLLLRLLLLLLPTDASAPQKPIYMVMVPSLLHAGTPEKACFLFSHLNETVAVRVSLESVHGNQSLFTDLVVDKDLFHCTSFTVPQSSSDELMFFTVQVKGATH

SEQ ID NO: 8443 - DNA, 285 bp, Homo sapiens
ggtggttgtactttctgttcgattaccgagcatgaaggacgggtgattcagagccgatctcatgaatctattttggatgaaattgaagatattaaagcaaaagtccctggctttactggacatatctctgatttaggtgggccgacatcaaatatgtataccttgaattgtaacgatgatgaagtgcaagcttcttgtcgtaagctttcttgtgtgtacccaactatttgctctaatttaaatacagaccatagtccaacaacgcagctttatcgtaaaacgcgt

SEQ ID NO: 8444 - protein, 95 aa, Homo sapiens
GGCTFCSITEHEGRVIQSRSHESILDEIEDIKAKVPGFTGHISDLGGPTSNMYTLNCNDDEVQASCRKLSCVYPTICSNLNTDHSPTTQLYRKTR

SEQ ID NO: 8445 - DNA, 572 bp, Homo sapiens
  misc_feature (1)..(1): Wherein n may be a, c, g or t
nccatgggcgctagaacgaagggtaaaggacgaatgcgtacctctcgttcaatctgtaattccaatctactagaagctcacaagaaactaaagaccttccccgctgaacgggttgaagatattacgtccatttccgaagtaaacacctcgttcaacgaaactgaaaagcagctaatatcaatcttgactggtaaactatctggttctccaagctatgattccgattgggaaaaaattctgaaagttgatctatcaaggggcaaactgaagaatatgtttggcatgcaaagactactaccgaatgtattagtgctaaatcttagtgacaatgaaatgaacactctagaaggtataccctcgaacgttgtacagctattttgttcaaacaacaaaataacgagcgcacattgttcattagccggattccacgatctggaatgcctcgacttatcgtacaacctcttgaatacaagtttaaaatttttgtcactttgtcatcacttgcaagaggtgaacctttcttacaactccatccaatccttagaagggataggatcgtcggagagaggctg

SEQ ID NO: 8446 - protein, 190 aa, Homo sapiens
  misc_feature (1)..(1): Wherein Xaa may be any naturally occuring amino acid
XMGARTKGKGRMRTSRSICNSNLLEAHKKLKTFPAERVEDITSISEVNTSFNETEKQLISILTGKLSGSPSYDSDWEKILKVDLSRGKLKNMFGMQRLLPNVLVLNLSDNEMNTLEGIPSNVVQLFCSNNKITSAHCSLAGFHDLECLDLSYNLLNTSLKFLSLCHHLQEVNLSYNSIQSLEGIGSSERG

SEQ ID NO: 8447 - DNA, 415 bp, Homo sapiens
gcgcgcatgcgtgtgtgttgtagcaggagaggaaaaggggtatttagcagaatcatctggagccatttcaaaatataccttccttctttcaattaggacttcacctaacaaaggtttatcaagtatccatcaggtacagacagcttttagaatgggccaacacccctatcctttaatatcaccccttcaacaagacacatattcatggatgtgttggctctgtctctggaggtgagagatagtgtatgctgtgcttcatctgtttacctctgcaaaagtcttccttattctttaaattaaagattcttcccatacaatatccaaggaggcaatctattatcacatctattttcgagctagaaaacaaaaaagacaccaaaaatttgagaaatttctccaagattacacaactagt

SEQ ID NO: 8448 - protein, 56 aa, Homo sapiens [sequence omitted]

SEQ ID NO: 8449 - DNA, 649 bp, Homo sapiens
  misc_feature (235)..(235): Wherein n may be a, c, g or t
  misc_feature (236)..(236): Wherein n may be a, c, g or t
  misc_feature (262)..(262): Wherein n may be a, c, g or t
  misc_feature (298)..(298): Wherein n may be a, c, g or t
cggtccacacgcatgctgcacctgacggaaggcggccagacatttctgatgcacgcgcgcagagtgctggatgaacttgaacaagccaaagcggccacctcggcactgaaccaggaacccagagggttacttaaactcaacttgccgcccgcatttgcccgccaccatatccttccggtcgttaacctgtttctggcccgctacccgcagatcaaactggagcttgtgctgatgnnacgaacagtcaacctgatccattcangcgtgggcctcgccatacgcattgtgcccttgccgnactcgacgctcaaagcccgcaagatctgcgccggcaagtacaggctggtggcaagcccggctttttgcagggagcacccggttccggcaacgccggcagacctcgccggccttccggcgattgtgagtacgcatgccgccgggcactttgcgtttgcccgcgccaacgaggtgttgccactggtgcataacgcctgtgtgcggatcaatgatctggatgctcagttaatcgccgcgcgccaggggctgggctttgcgttgctgcctgactggctggtggccaagagtcttgaagcgggtgaactgcaagcctggctcgatccatgggagatccgtggcgcggagcacgcgt

SEQ ID NO: 8450 - protein, 216 aa, Homo sapiens
  misc_feature (79)..(79): Wherein Xaa may be any naturally occuring amino acid
  misc_feature (88)..(88): Wherein Xaa may be any naturally occuring amino acid
  misc_feature (100)..(100): Wherein Xaa may be any naturally occuring amino acid
RSTRMLHLTEGGQTFLMHARRVLDELEQAKAATSALNQEPRGLLKLNLPPAFARHHILPVVNLFLARYPQIKLELVLMXRTVNLIHSXVGLAIRIVPLPXSTLKARKICAGKYRLVASPAFCREHPVPATPADLAGLPAIVSTHAAGHFAFARANEVLPLVHNACVRINDLDAQLIAARQGLGFALLPDWLVAKSLEAGELQAWLDPWEIRGAEHA

SEQ ID NO: 8451 - DNA, 369 bp, Homo sapiens
  misc_feature (369)..(369): Wherein n may be a, c, g or t
agatctgaatccgcaggatcaaaagtgcacgcgatacaccaggaaaatgtgacacagattcacaactttcaagatgagaaaaccaaggtctgcagaaaaacagcacacaggtttttgtgctggagaaaaacagcacaaaagatgaggccacggctgccccctccatcccctccctgcgcacctcggggtgaagcgatggggcgccgccggcccaggttgtaggagagacaaggagcccccacccagctcaaatcctcccccctgttccccagagcctgcgtcttttgagggccaccatgcaaacctcacacataggctgtgtgaccctgaatagcttttgtggcctctggtgcctctgtttccctagtn

SEQ ID NO: 8452 - protein, 55 aa, Homo sapiens
MEGAAVASSFVLFFSSTKTCVLFFCRPWFSHLESCESVSHFPGVSRALLILRIQI

SEQ ID NO: 8453 - DNA, 232 bp, Homo sapiens
acgcgtcaaacgggtagccagatcgcctcgctggggggggacgtcggcgtttcagcaggcgagcaatacacccaaattgccagccaggttgttgcgcctaaaggcgacatcgatatcaaagccaagcatgtggacatcgcggctggcttcgacaccctcaaagccagcaatacggcgagtaccagccgcacgcacattggcgggacggtcagcgttccaatggttgacgcgt

SEQ ID NO: 8454 - protein, 77 aa, Homo sapiens
TRQTGSQIASLGGDVGVSAGEQYTQIASQVVAPKGDIDIKAKHVDIAAGFDTLKASNTASTSRTHIGGTVSVPMVDA

SEQ ID NO: 8455 - DNA, 409 bp, Homo sapiens
  misc_feature (6)..(6): Wherein n may be a, c, g or t
  misc_feature (310)..(310): Wherein n may be a, c, g or t
  misc_feature (311)..(311): Wherein n may be a, c, g or t
  misc_feature (325)..(325): Wherein n may be a, c, g or t
  misc_feature (333)..(333): Wherein n may be a, c, g or t
cctagncagttatcgtactagttttgtgaatcctgctgaagacatggctgctgggtcagacaaaggactttattattattcacagtacaatagtagcatgaacttcatgtttgtgttggtttcccttgctcctccaaatcccatgggaatgatgctcaggaatatgttgtccactcggtgggtttgcatcccagcattggaaccctgaacttagggaagtcaagtctttttgtatgacttttagtgcacttcagtagcctgccttacttgctgaggaaggagatactgtctttgttatactggacactannacagcctgtctccnaagggganacactgtgtctttcaggggttcactgtacgacgtccttgaaagatagtctaaaacaaagggcgatagtgctatgtt

SEQ ID NO: 8456 - protein, 54 aa, Homo sapiens
MAAGSDKGLYYYSQYNSSMNFMFVLVSLAPPNPMGMMLRNMLSTRWVCIPALEP

SEQ ID NO: 8457 - DNA, 303 bp, Homo sapiens
  misc_feature (103)..(103): Wherein n may be a, c, g or t
  misc_feature (151)..(151): Wherein n may be a, c, g or t
  misc_feature (152)..(152): Wherein n may be a, c, g or t
ggcttcggcgcgctacgctacctgggtgataatcatgctcggcaggtgttgagcgggctggcacagccgcgcattacgttcaactacttgggccagttcgacngggaccttcgaagaggatgccacgggggccttttttactccgacgggnncgaggaggctgggcctgaacaaagcgaacaggcccagttgggtaactggctggagattaacggccaggtctacggcggtgagctgaacctgagttggagctttagccgtgaaatgttcagtgaagccactgtgcagcggttggctcacgcg

SEQ ID NO: 8458 - protein, 101 aa, Homo sapiens
  misc_feature (35)..(35): Wherein Xaa may be any naturally occuring amino acid
  misc_feature (51)..(51): Wherein Xaa may be any naturally occuring amino acid
GFGALRYLGDNHARQVLSGLAQPRITFNYLGQFDXDLRRGCHGGLFYSDGXEEAGPEQSEQAQLGNWLEINGQVYGGELNLSWSFSREMFSEATVQRLAHA

SEQ ID NO: 8459 - DNA, 225 bp, Homo sapiens
  misc_feature (1)..(1): Wherein n may be a, c, g or t
nacaggaagctgacggcctgcccagagctgccacccaacgtgcaggagatcttggggctggcacagccagaagagcctagtagcccatctcctccggtatccccaatgcccttgtcacccactcgagccccgatgcccccgccgccgcctgaggaagtggccccgcagcctgacagcagtctggagaatctgcctgaggatgaagatggtgcttgactaacgcgt

SEQ ID NO: 8460 - protein, 71 aa, Homo sapiens
  misc_feature (1)..(1): Wherein Xaa may be any naturally occuring amino acid
XRKLTACPELPPNVQEILGLAQPEEPSSPSPPVSPMPLSPTRAPMPPPPPEEVAPQPDSSLENLPEDEDGA

SEQ ID NO: 8461 - DNA, 360 bp, Homo sapiens
taattaggcaaaatctaaaatagaattaaatgtgcagtttcctccttgttcctcctgttctgcccactgccttctgctccagtttcagtcgagcacaggagccctgaaatgagcgctgtgcctctcctgccctgtctgtagtcacgtagggctggagccaaacaactgcatgtggttctgagcgaattaggatttaacaaaggaaccaagaataattttttatgcatttccaagagtatggttatatgattaaatcgctactgcatttttaccaccccagtgacatcattatataggttggggtgagggttggtgggggaaagaccttggctcgtgtttaggttttgcgtggtttgtaca

SEQ ID NO: 8462 - protein, 70 aa, Homo sapiens [sequence omitted]

SEQ ID NO: 8463 - DNA, 291 bp, Homo sapiens
tctagaattcccttgttagcttcgagatcagataacattttggattccaatgtggatgaccaattgttcgatttggggttgacaagattacctttatcaccaacaccaaattgtaattctttgcatagtacaaccacaggtacatctgccttacaaattcctgagctacccaagatggggtcttttagaagtgatacgggaatcaatccaatttcaagttcaaacacagtttctttttagagcaaatcaggcaataataattcaaagggtcgaatcaaaaaaagggaagaa

SEQ ID NO: 8464 - protein, 79 aa, Homo sapiens
SRIPLLASRSDNILDSNVDDQLFDLGLTRLPLSPTPNCNSLHSTTTGTSALQIPELPKMGSFRSDTGINPISSSNTVSF

SEQ ID NO: 8465 - DNA, 219 bp, Homo sapiens
  misc_feature (1)..(1): Wherein n may be a, c, g or t
ncgctcatataattctttctccatagcctaaatacaccaacgatgactaaatctgtagatacactgctgattccaggccccattatcctaagcggacgagtccagaaggccctggacgttccctccttgggccacacctctcctgagttcgtctctatttttcaaagggtgctaaagaacacaaaagctgtcttcaaatccgctgctggctcgaagtcc

SEQ ID NO: 8466 - protein, 59 aa, Homo sapiens
MTKSVDTLLIPGPIILSGRVQKALDVPSLGHTSPEFVSIFQRVLKNTKAVFKSAAGSKS

SEQ ID NO: 8467 - DNA, 328 bp, Homo sapiens
tcatgagcggctccgcgacttgaaacgcctgcacgtttgaacaacatctcacacgaccatctgcacgtatgcactacttcgctatctgaggcctcacgtgaccccgacgattcatagcgtcaaactcacatcctgcatcgacgcaagatatggagaaaacatgaaaagatcaaagaagatcgcagcagccctgacctcgctgacgaccatcgtggcaaccaccttcgcaaccatctcggcagccccggcgcacgccgctgacagcaacacctcggttccgccggaaatcactatgcccggcagtccggacggtattccatctgccggc

SEQ ID NO: 8468 - protein, 56 aa, Homo sapiens
MKRSKKIAAALTSLTTIVATTFATISAAPAHAADSNTSVPPEITMPGSPDGIPSAG

SEQ ID NO: 8469 - DNA, 314 bp, Homo sapiens
ggatccctgttgatgtttttagagtcccttctctgtgcagctctgtcctgactgcctcctcatcctgcaaatttcaacagctcagcggcttgagacttccatccctgccacctcagcttctccagactgcaggccccatgtggtttcaccatccccacctgcagcctgagaggctcccagtcatcgcctgtgcgcaggggccaccgtcctgcacggcggtatcctgggtctgaagccaagcacttcatatattctacccagtttgtagttgttgacagtggaggtgaggtccagtgtcagttactctgtcatga

SEQ ID NO: 8470 - protein, 62 aa, Homo sapiens
MKCLASDPGYRRAGRWPLRTGDDWEPLRLQVGMVKPHGACSLEKLRWQGWKSQAAELLKFAG

SEQ ID NO: 8471 - DNA, 245 bp, Homo sapiens
acgcgtgaaggggggaatttcttgtgatgacaatattttatacagttcactttcaaaatacagcttgattccaccatgattttctgtgtcagttttaaatttttgtcactttgtttttttaagataaggtttggaaccttaagatatttctcctccttgtggaaatttcttgattatctctttgttaatgttatttatgctgctcctcttttaatattttatctttctatttacttttgcaattg

SEQ ID NO: 8472 - protein, 56 aa, Homo sapiens [sequence omitted]

SEQ ID NO: 8473 - DNA, 289 bp, Homo sapiens
  misc_feature (289)..(289): Wherein n may be a, c, g or t
gccggcgacgggcgacacgagcagatcggcacggtccgagcagttggcagccgcctgtgcagacagcaccaacgtgagcagcgcagcgggcgccaggcggcgtgcaatgctcatccttgcttcctggccgtgcgggtcgatagaaaccgaggccatgtgggttcctttagcatgcaggccggtgtgggtgggggcagcagcgatcagttggctgggcaacgccgacgccgggtcatccatgccggggccccattccagggcatgcttacccaaagccttggaccgcttn

SEQ ID NO: 8474 - protein, 80 aa, Homo sapiens
MDDPASALPSQLIAAAPTHTGLHAKGTHMASVSIDPHGQEARMSIARRLAPAALLTLVLSAQAAANCSDRADLLVSPVAG

SEQ ID NO: 8475 - DNA, 339 bp, Homo sapiens
tccggaaatctatagttgaatttttgcaggattatacttcgctcgaatattgtgcgtgttaaatactcagcgagaacaatacttccaagttagaaaagggatttgctcatgttaaagcaatggcactccgaatggacggtgtcaggaattcttttcttcacatcaggcttcgcatagaaaatggccattggcaaaaggttactggtgaacaaaccagcagaagaatcattttatgcttctccaatgtatgattttttgtatccgtttaggccagtggggaaccaatggctgccagaatatattatctttgtatgtgctgtaatagtgaggtgcccaatt

SEQ ID NO: 8476 - protein, 53 aa, Homo sapiens
MAIGKRLLVNKPAEESFYASPMYDFLYPFRPVGNQWLPEYIIFVCAVIVRCPI

SEQ ID NO: 8477 - DNA, 390 bp, Homo sapiens
acgcgtaaagttgtataaacaagtgaaagtttataaacctaggctccatcgaaattgttgttaattgtaaaaagacctaaaagaagtttatccaccttgttagtttgtatccggtctcaatttttacaggtatatttgtaaagaagcaagaaataaagtgcgaacaaaatggctaaaggtgctgttactaaactgaagtttaactcacctataatatctacctccgatcagctgatatcaacaaatgaactattagatcgtttaaaagctttacatgaggaattagcctctctggatcaagacaatacagatttaacgggattagataaatatagggacgcactagttagcagaaaattattaaaacataaagacgtggggatcgtcgga

SEQ ID NO: 8478 - protein, 74 aa, Homo sapiens
MAKGAVTKLKFNSPIISTSDQLISTNELLDRLKALHEELASLDQDNTDLTGLDKYRDALVSRKLLKHKDVGIVG

SEQ ID NO: 8479 - DNA, 230 bp, Homo sapiens
tatgcttgccgctcctcagcagtccagcagacacttctctgacctgaggtatcggtagcactggaatgataatccccccgcccccctcgacttgcaacactgctttatttggggtcaaggaaacacacagccccagcttctctcccatcactcggcctcccctcttgcagaatccactattatccagccacttgcacggggcatccatggctgacccatgagtcatcctt

SEQ ID NO: 8480 - protein, 75 aa, Homo sapiens [sequence omitted]

SEQ ID NO: 8481 - DNA, 290 bp, Homo sapiens
  misc_feature (290)..(290): Wherein n may be a, c, g or t
cctaggttataaagataaagccttaaactttatctcatcatccaacccaatttccagccacaatgaagtacttaaaactctgtgtctttgtacttgctgttctcttggcctccaattccttttcatcttttccattcggtaaagtttgtttatcccacaggccccatcttggaagcctccagcaacttctccagacagaggtgttagcagtgtaggatcagatttctcaaccacctcactcccatgtctgggtagatatctctgcccaagtgttctcatagcacttgagn

SEQ ID NO: 8482 - protein, 90 aa, Homo sapiens [sequence omitted]

SEQ ID NO: 8483 - DNA, 318 bp, Homo sapiens
aaattttcagaagtcctggtgttgcgcggtcaaacagggaccgaggagggacgaccgcctccccgtgacgctgcttcttcttcctgcctgcagctgaggggtctgttttgtgtcgcttccgctccttcctcacgtacacagggggcagcttagcctctgggatgggagtggcttcatacatgagacacatgcccgagtcgaggtagatgtcgctgtcgtcctgcggcggggtgggtggggtccagaacggcatgacttctgtctgcccatcgacatcttcgtagacatactccatgttgtaggcatcccctcacgcgt

SEQ ID NO: 8484 - protein, 98 aa, Homo sapiens
MEYVYEDVDGQTEVMPFWTPPTPPQDDSDIYLDSGMCLMYEATPIPEAKLPPVYVRKERKRHKTDPSAAGRKKKQRHGEAVVPPRSLFDRATPGLLKI

SEQ ID NO: 8485 - DNA, 369 bp, Homo sapiens
gcctacgcgcaattcctcgcgggtatggcgtttaacaatgcgtctctcgggtatgtgcatgcaatggcgcatcagctgggcggtttttacgatctgccgcacggcgtgtgcaatgcgatactgttgccacacgtgcagacgtttaactgcaaagtggcggcctcgcgcctgcgtgattgcgcccaggccatgggtgtcgatgtcagtcaaatgacagcagaacagggcgcacaggcgtgtatcgcagagattcgctctctggcacgtcaggtgaatatcccggtgggattgcgtgacctcaacgtgaaggaagcggacttcccgattctggcgaccaacgcgctaaaagaccctgtgggtttgattaat

SEQ ID NO: 8486 - protein, 123 aa, Homo sapiens
AYAQFLAGMAFNNASLGYVHAMAHQLGGFYDLPHGVCNAILLPHVQTFNCKVAASRLRDCAQAMGVDVSQMTAEQGAQACIAEIRSLARQVNIPVGLRDLNVKEADFPILATNALKDPVGLIN

SEQ ID NO: 8487 - DNA, 382 bp, Homo sapiens
ctcgagacttgttttatggcctggctgtgtaatatctgtgaatgttcctcaggtgcctacaaatgtgtattctccaacggctagctacacggttctgtatcaattatggaatcatgccagtcgcctctgctgttgaaatattgtatgtgcacacacagtatgtaatgtgcgttttatacatatctatatctccactacatatttagttatcaataattgggaggtgttttgagctctcaggaggataccgggtctgtccatttatctctgcagacctattaacttttgcttttcagcttttagaaagctgagtcagtccagactcaccacaagccccatacgaattcaatgcagggatggatcagggctgatgaggccatgg

SEQ ID NO: 8488 - protein, 54 aa, Homo sapiens
MFLRCLQMCILQRLATRFCINYGIMPVASAVEILYVHTQYVMCVLYISISPLHI

SEQ ID NO: 8489 - DNA, 264 bp, Homo sapiens
  misc_feature (1)..(1): Wherein n may be a, c, g or t
ncgcttctttccattcgaattccaccagaattgacttccgatgaggatagtttgccagcagaaagcgaggatgaatccgtagcgggtggaggaaaggaggaggaagagcctgatctcattgatgctcaagaaatatatgatttgatagctcatatttccgaccctgagcacccgttaagtctgggacaactctctgttgtaaatttggaagatattgatgttcatgattcaggaaaccagaacgaaatggctgaagtcgtgatc

SEQ ID NO: 8490 - protein, 88 aa, Homo sapiens
  misc_feature (1)..(1): Wherein Xaa may be any naturally occuring amino acid
XLLSIRIPPELTSDEDSLPAESEDESVAGGGKEEEEPDLIDAQEIYDLIAHISDPEHPLSLGQLSVVNLEDIDVHDSGNQNEMAEVVI

SEQ ID NO: 8491 - DNA, 358 bp, Homo sapiens
  misc_feature (1)..(1): Wherein n may be a, c, g or t
ncgatcttgtggcagttagcttttttttaccaccgctgataatcttgaataggttgtaaactgcccccaacatctcacttggtttaggtaaaatagaaggttggctactataaaacttagaacaatagcagaagtttgtgtgtcgtagagacctttaaagtcactgcctgattatagccagttacataattggatgaaacaacctgaagaaattatgggtctcctacttccaaagatagaggtacacatatacagctgattatagacagtaatgagaaatctattattcactactaacattaagtactcatttcccagtcccaggcaacttcccattttcttccattaaacttaatta

SEQ ID NO: 8492 - protein, 54 aa, Homo sapiens [sequence omitted]

SEQ ID NO: 8493 - DNA, 331 bp, Homo sapiens
gtgcacatgcgcacccgtcacgagatggtcgagctcatcgtcgccgacgggcgagctcgcggcatcgtgactcgtgacatggttaccggcaagatcgaagagtggtttggtgacgccgtcgtcctggctaccggtggttacggcaacgtcttcttcctgtcgacgaacgccatgggctgcaatgccaccgcctcgtggcgtgcccaccgtaagggcgcttacttcggcaacccctgctacacccagatccacccgacctgcatcccggtgcatggtgaaaaccagtcgaagctgactctgaagtcggagtcgctgcgtaacgacggccgta

SEQ ID NO: 8494 - protein, 110 aa, Homo sapiens
VHMRTRHEMVELIVADGRARGIVTRDMVTGKIEEWFGDAVVLATGGYGNVFFLSTNAMGCNATASWRAHRKGAYFGNPCYTQIHPTCIPVHGENQSKLTLKSESLRNDGR

SEQ ID NO: 8495 - DNA, 333 bp, Homo sapiens
  misc_feature (333)..(333): Wherein n may be a, c, g or t
actagtcatgcggtacaggtgaacactggagggtctggcacgttgtaggtacccaataaacgtttgttgaatgaataacaaatgaataaaatagcaagaccctaatccaagatgagagaacagagaacaatgaagtctagctattttcaggaacgcatccagatgtataacgcacacatccatattcctttgaatacagaggatggactgaaggaaacaatccaaggtcatcacatccatgtctgaataccaagaatggtagtgtcactaagcaagatggggacacacagaaacattttagacagtgaagaggaatatatcacaaaggcgaan

SEQ ID NO: 8496 - protein, 80 aa, Homo sapiens [sequence omitted]

SEQ ID NO: 8497 - DNA, 256 bp, Homo sapiens
gtgcacagataggacttgagtgtaccccagtctccatcgtctagccgaccataggcgcaggccagcacagagcctgtggtgttccaggaaatgccagtcacatgcagaccctgcccttgggctggggggtagcccagggtgtgcagacaggacaccgtctgctgctgctcagtccagttgacctcatagccatcgaaggcatggctctgccagttgttgttcagctcccggacgaccatggcctccaccctccgga

SEQ ID NO: 8498 - protein, 79 aa, Homo sapiens
MVVRELNNNWQSHAFDGYEVNWTEQQQTVSCLHTLGYPPAQGQGLHVTGISWNTTGSVLACAYGRLDDGDWGTLKSYLC

SEQ ID NO: 8499 - DNA, 375 bp, Homo sapiens
  misc_feature (258)..(258): Wherein n may be a, c, g or t
tctagaactgttactgaaacatgtcatttaacttttcatatgtatcttgtcctgctctaacgaggttggaaactccacagagcgcatgtggcatcctgtgtatcttggtgcctggctaccatttctctccatgtctgcacgggaccctatgcagaggggcttcatacacatttttaatatttccacttaaaagttataaacttgattgcactttaattcagtgaggtagctgagcagtagccaacctcctaaattatnttttccatgctgatttctttgtgaatggcttgagaaaaattgtcatctggaatgtaagagaagaaaatctcctgtagcagccagggctaatgggcacatttatctttgagagagaca

SEQ ID NO: 8500 - protein, 67 aa, Homo sapiens
MSFNFSYVSCPALTRLETPQSACGILCILVPGYHFSPCLHGTLCRGASYTFLIFPLKSYKLDCTLIQ

SEQ ID NO: 8501 - DNA, 241 bp, Homo sapiens
  misc_feature (1)..(1): Wherein n may be a, c, g or t
ngtcgacgggaccacgcgggtcgtcggcgcacccgcagccatcggcgagaccgtcgtcgcgacagtggtggggaccgaaggcatcgacctcgtcgcggatccccgatgaccgagaggccctcgcccgtcgccaggatggcgccgagtgcgtggaacatcgccaatgggctgacggtcctgcggctcctgctcgtcccggtgttcggctggctgctcctgtggggcgacggtcacgacgcgt

SEQ ID NO: 8502 - protein, 80 aa, Homo sapiens
  misc_feature (1)..(1): Wherein Xaa may be any naturally occuring amino acid
XRRDHAGRRRTRSHRRDRRRDSGGDRRHRPRRGSPMTERPSPVARMAPSAWNIANGLTVLRLLLVPVFGWLLLWGDGHDA

SEQ ID NO: 8503 - DNA, 423 bp, Homo sapiens
  misc_feature (1)..(1): Wherein n may be a, c, g or t
  misc_feature (204)..(204): Wherein n may be a, c, g or t
nctgccatatgatttaattgcaaccaattgtagctcatgtgcagatgcttaatttcattcaatgattcaaaaatatttattggacacctactatctgatgattaaattagataactaaatgtttttattaaaaaaaagtgctattacaattgcaggtgatggtcatcagttgtaacaaatgtaccacattaatgcaagatgctnatagtgggaactgtgtgtgtatcagagaaagaggttgcatactagaactctgtactttcctctcaattttttttgtatatcttaaactactcttaaaaagtctcttaaaagaaagcaaggtaattttgttgttgatactgaatgtaaggtacagtatcacaatattatttaataattattactgctagcttaaagaagaatgaaaatgttttaaacact

SEQ ID NO: 8504 - protein, 77 aa, Homo sapiens
  misc_feature (16)..(16): Wherein Xaa may be any naturally occuring amino acid
MVISCNKCTTLMQDAXSGNCVCIRERGCILELCTFLSIFFVYLKLLLKSLLKESKVILLLILNVRYSITILFNNYYC

SEQ ID NO: 8505 - DNA, 171 bp, Homo sapiens
gccggccgaacgcgcggccctggagttgcgtcgcgatgaagccgtacgcgcgctgcaggacgaagacaagcgctaccagatcgtcaaggacatcgccgatgacctcaaagtcggctacaacacggccgaaatggtcttcgcccggatcaaccaggtgcatgtgatcaaaga

SEQ ID NO: 8506 - protein, 53 aa, Homo sapiens
MHLVDPGEDHFGRVVADFEVIGDVLDDLVALVFVLQRAYGFIATQLQGRAFGR

SEQ ID NO: 8507 - DNA, 291 bp, Homo sapiens
  misc_feature (190)..(190): Wherein n may be a, c, g or t
caattggtcggtatcggcgtgcaggtcggcctggtgattggtggtggcaacctgttccgcggtgcggcactgagtgctgtcggtatggaccgggttaccggcgaccacatgggcatgctggccactgtgatgaacgccctggccatgcgcgacgccctggagcgcgccaacatctcggccatcgtgatgntcggctatttccatggttggcgtgaccgatcactatgatcgccgcaaagccatgcgcacctgaacgccaaggaagtggtgatctttgccgccggtaccggt

SEQ ID NO: 8508 - protein, 75 aa, Homo sapiens
  misc_feature (64)..(64): Wherein Xaa may be any naturally occuring amino acid
QLVGIGVQVGLVIGGGNLFRGAALSAVGMDRVTGDHMGMLATVMNALAMRDALERANISAIVMXGYFHGWRDRSL

SEQ ID NO: 8509 - DNA, 317 bp, Homo sapiens
cctaggattggaggtcagaagctcccagaaggagccggctctgttgcacacagaagacaggttttctgagtaggagactgactggaggttgggagggctctcatgtgggacttgcccttaagtcaggagtcagggggacagtggccttctctaggggacgggccttctgcactcatctggggaggatttgggctccaggtttctggtgaacagctgaggtcttatttacagaggccaggagcctcccgccttgcacccggcacatgtgtataggtctcggactggacgcccccgtgcatggctgtgatcccccatgg

SEQ ID NO: 8510 - protein, 56 aa, Homo sapiens [sequence omitted]

SEQ ID NO: 8511 - DNA, 291 bp, Homo sapiens
ggtaccacaggaagctgggtagctccctcatggtaggagatggccatagatcccccacacaccaagaaagggctcagaaaatgctcctgccctctggctcaccacccccctccagcaggtgggtgaaaagggcagccggggagctgatgcccaaggtatcctcatccttcgagcagaaatgggacacggaagtggctgtcagcacctcttacatgacagaaatgctatagtaagggacaggagatgggggaagacaaaagggggttcctacttattaagtcaaatagatct

SEQ ID NO: 8512 - protein, 66 aa, Homo sapiens
MVGDGHRSPTHQERAQKMLLPSGSPPPSSRWVKRAAGELMPKVSSSFEQKWDTEVAVSTSYMTEML

SEQ ID NO: 8513 - DNA, 168 bp, Homo sapiens
atgaacgaagttcctaccactccagttaggcttattttagggcaagctcagcaacgcgagcagaattcagaaaactgttcgcaagaacgtaacccacgcacgtttaattccgaaccggattccagctttaactctcctggttcctcccagttcgtgatacatcctcat

SEQ ID NO: 8514 - protein, 56 aa, Homo sapiens
MNEVPTTPVRLILGQAQQREQNSENCSQERNPRTFNSEPDSSFNSPGSSQFVIHPH

SEQ ID NO: 8515 - DNA, 331 bp, Homo sapiens
  misc_feature (68)..(68): Wherein n may be a, c, g or t
  misc_feature (131)..(131): Wherein n may be a, c, g or t
  misc_feature (242)..(242): Wherein n may be a, c, g or t
  misc_feature (271)..(271): Wherein n may be a, c, g or t
  misc_feature (272)..(272): Wherein n may be a, c, g or t
  misc_feature (298)..(298): Wherein n may be a, c, g or t
  misc_feature (309)..(309): Wherein n may be a, c, g or t
  misc_feature (310)..(310): Wherein n may be a, c, g or t
tccggagacctaaatgcctatgcacagtagaatgaatgggctggggttcatgtgtagaggggatcccnaggagcaacgggcacgaatgacagcactgctgctacaatcacaacatggaccagtttcacaanagacacgttctgtgcaattccattcagtaagatgtttaaaaagaagtaaaaattatggtgtcaggatggggagcagctaggattagcagaagaagaacaggggtttcccgngggtactttttatgttctctcttgactanngctctatgtatatgaaaaaattgcanacttgtctagnntgtcacctatggtttgtgcac

SEQ ID NO: 8516 - protein, 65 aa, Homo sapiens
  misc_feature (19)..(19): Wherein Xaa may be any naturally occuring amino acid
  misc_feature (40)..(40): Wherein Xaa may be any naturally occuring amino acid
MPMHSRMNGLGFMCRGDPXEQRARMTALLLQSQHGPVSQXTRSVQFHSVRCLKRSKNYGVRMGSS

SEQ ID NO: 8517 - DNA, 267 bp, Homo sapiens
  misc_feature (266)..(266): Wherein n may be a, c, g or t
  misc_feature (267)..(267): Wherein n may be a, c, g or t
acgcgttaattaggatattgtcgtttaaagacaaacatagggtaagtgcagtgcagcgtttgttctgtttgaacaaaaacttcaaagaactcaaaaaacaaaaacgtatgaaacgagaattggtgttcttatttgcgataagtttccgttcttcttccatggtcatatgttcctgctgctattttgttgccattcttgtcatattcggtgaaatcgccgtggcgttctccttgataataactgccttcaaatcgagttccatcagnn

SEQ ID NO: 8518 - protein, 55 aa, Homo sapiens
MTMEEERKLIANKNTNSRFIRFCFLSSLKFLFKQNKRCTALTLCLSLNDNILINA

SEQ ID NO: 8519 - DNA, 521 bp, Homo sapiens
  misc_feature (1)..(1): Wherein n may be a, c, g or t
  misc_feature (2)..(2): Wherein n may be a, c, g or t
nnactagttcactgggggttcagtcttagcaggacccagggcttccccttccactggtgctcttactaggatattcattgctacctatggggtcagagtccagggtcagtccatgtatagtctttaggtagtggcttagtccctggaagctctgattgcttgacattgttgtacttttggggtctcgagccccttcaagctcttccagttctttctctgattccttcaataggggacctattctcagttcagtggtttgctgctggcattcacctctgtatttgctgtattctggctgtgtctctcaggagcgatctacatccggctcctgccggtgtgcacttctttgcttcatccatctagtctaattgggtggctggatatgtatggggcccaaatggggggcacactctgaaagggggctccttcaggctctgttttaaccttggcctctctattccctgccaagggtattcttgttccccttttaaagaaggagtgaagcattcacattttgatca

SEQ ID NO: 8520 - protein, 80 aa, Homo sapiens
SLGSGLVPGSSDCLTLLYFWGLEPLQALPVLSLIPSIGDLFSVQWFAAGIHLCICCILAVSLRSDLHPAPAGVHFFASSI

SEQ ID NO: 8521 - DNA, 412 bp, Homo sapiens
acgcgtatcgagatgatgcatggggccgttatatgcagggcttacaatatgaaaaaaacaaacaatacgatgatgcacgtatcagttatcaggctgccgcaactctctacgaagcaggttatgcgaaacaatacggtttgtctgacataacgaccgaaagagcttggctcgatacagttcgtatgatgcgcaaaggcggtggctggagccatcaagaaatagccaaactcattagcagtaaactctctagtaaaatgcaaataaccctcgcttcttatcagcaagataatggtgaactggtgatacttgagcacgaggggtttattccagataaaagcgaaatgacattacagctgtatgctgacccaaaagcctattctttagtcttacagccgctagcaggcagtgatca

SEQ ID NO: 8522 - protein, 126 aa, Homo sapiens
MQGLQYEKNKQYDDARISYQAAATLYEAGYAKQYGLSDITTERAWLDTVRMMRKGGGWSHQEIAKLISSKLSSKMQITLASYQQDNGELVILEHEGFIPDKSEMTLQLYADPKAYSLVLQPLAGSD

SEQ ID NO: 8523 - DNA, 276 bp, Homo sapiens
actagtgactaagcctcgttttctctctctgcccaagtaactgaagctcaccacatggtggcccagcaccggccttctccccatttgtgaaaaccagtccacttgcccttcccgtaggttgatgccagaagtaacaagaggactctagttcgaagtccttaacatttaataaacaagaagacatattggggagttacaacagctcttgatctttttatgttttattttttctcctttagctggctcggaacacattttctgagcccttgaagatct

SEQ ID NO: 8524 - protein, 60 aa, Homo sapiens [sequence omitted]

SEQ ID NO: 8525 - DNA, 288 bp, Homo sapiens
gcgtactccgaagccgagccgacgaccggcatcgagatccacaagtacggggcacacctgttccacacgtccaacgagcgggtgtgggagtacgtcaaccagttcaccgactttcaccgcttcaaccaccgggtgttcgcgctgcacaacgggcaggcctaccagttcccgatgggcctcgggctggtcagccagttcttcggccgctacttcagtcccgacgaggcgcggaagctgatcgccgagcaggccagcgagatcgagaccgcaaaggcgcgcaacctcgag

SEQ ID NO: 8526 - protein, 96 aa, Homo sapiens
AYSEAEPTTGIEIHKYGAHLFHTSNERVWEYVNQFTDFHRFNHRVFALHNGQAYQFPMGLGLVSQFFGRYFSPDEARKLIAEQASEIETAKARNLE

SEQ ID NO: 8527 - DNA, 446 bp, Homo sapiens
tccggagcattatcagagactttactgaacaccctgaactggtatttaatagtcaacatggctcaagccctagaggaaacttggcagcaatccttctcctttgggagccaacatacagcaccctgcacaaggttttgcccagagcaggcgctaaacaggtgtagaacgaatgaatacgttttagacttgagtgtgcagtccctattatccagtacactgctatagaaatgaaatctattggcaaatcagccaacctgagcagagcatgagtataatcaagtgagagctccttgctcatacgcagtgactccccgactcactgtttcaccaagttgacactattacgtggccctgatttggatgatggttaaggttttacctgatcaactataacaaggaatcacctatattgcctgcatggatataacaagggctttctagctcct

SEQ ID NO: 8528 - protein, 81 aa, Homo sapiens [sequence omitted]

SEQ ID NO: 8529 - DNA, 249 bp, Homo sapiens
  misc_feature (106)..(106): Wherein n may be a, c, g or t
cgcgagatgaagtcgcgcttcggcaagtactttgagggctcgatgggtgccgaggcggttaagcgtcgtctgcacgatttcgacctcaagagtgagtctgagaacntgcgcgagattatcaagactggtcgcggccagaagaagacccgcgcccttaagcgccttaaggtggtgcaggctttcctcgattccggtaacgtcccggaggctatggtgctggactgcgtgccggtcatcccgccggacctg

SEQ ID NO: 8530 - protein, 83 aa, Homo sapiens
  misc_feature (36)..(36): Wherein Xaa may be any naturally occuring amino acid
REMKSRFGKYFEGSMGAEAVKRRLHDFDLKSESENXREIIKTGRGQKKTRALKRLKVVQAFLDSGNVPEAMVLDCVPVIPPDL

SEQ ID NO: 8531 - DNA, 515 bp, Homo sapiens
  misc_feature (235)..(235): Wherein n may be a, c, g or t
attggagttctgctgactttgcagagcaggggaaaagtgctaagtttacgtatagtatcatgaggattgttgaaatgagtttgttgatcttttcatataatttcctagaggaaaacattgagtataggccagggatgtgtgtgtgtgtgtgtgtgtgtagctattcacaggcaggaccatagcacactacagcctcaaactcctgagctcaagtgctcctctcacttagccttcntgaatagctgggactataggtgcaccactgtgcctggatttacttttttggataccaacagagactataacttattgaggctaaaacctgttagaggtccacttgaagatactgtcattaacagatagtaagtatctacagtgtacataagtatctacagtgtacatagtattcccctcaaagtttatagtcttggtggggaagcagcttgaatgtagaatgtactgccaggcagtacatactacacaaatgacaaagaccagtgccataggagtccgga

SEQ ID NO: 8532 - protein, 84 aa, Homo sapiens
  misc_feature (43)..(43): Wherein Xaa may be any naturally occuring amino acid
RKTLSIGQGCVCVCVCVAIHRQDHSTLQPQTPELKCSSHLAFXNSWDYRCTTVPGFTFLDTNRDYNLLRLKPVRGPLEDTVINR

SEQ ID NO: 8533 - DNA, 204 bp, Homo sapiens
gatcccagaagaagaacaggccgtcatttcttgacaccggagaatttatcctctacattacaaatcacaaacttacctccagaatggaaccaagatataattacttcggtcgtggccggttctggtccagttatagatataaaagctaagaatgacccgagaactggtaaactaaccggtgtactgttcgattatttgactagt

SEQ ID NO: 8534 - protein, 68 aa, Homo sapiens
DPRRRTGRHFLTPENLSSTLQITNLPPEWNQDIITSVVAGSGPVIDIKAKNDPRTGKLTGVLFDYLTS

SEQ ID NO: 8535 - DNA, 207 bp, Homo sapiens
tggccattccctctaggaagccctggaagaactgcatgtgccccccacattgggtcccaccccctcacgtggatttgtatcttcacacttgtgccactgtgccatctcattgcacaccgattgcattttatcccttttgccaaagggagctgcgatcagttgttttctgtgtccccagcatcttcacagcaggcttatacacaattg

SEQ ID NO: 8536 - protein, 57 aa, Homo sapiens
MCPPHWVPPPHVDLYLHTCATVPSHCTPIAFYPFCQRELRSVVFCVPSIFTAGLYTI

SEQ ID NO: 8537 - DNA, 313 bp, Homo sapiens
tccggaacacagtccttgctgccctgatgctcccagtacttgcaggacccagacaaagctctggcagttgtgctgatagcaatggggaacctgagaggaactagcaccctcttgcagccaacgatcccttggctgccccggcagggggagtgtgggtggcaccatcccaggctgctcccccatcacccagccttcaggaggcttcgagcgacttctccaagcaaagaacacagtgcattgaggccagctgctgcccaccaatcaaaacaagtccagtgtcctccccagcgcgcctaaaggcaggtgcaggtgc

SEQ ID NO: 8538 - protein, 71 aa, Homo sapiens
MGNLRGTSTLLQPTIPWLPRQGECGWHHPRLLPHHPAFRRLRATSPSKEHSALRPAAAHQSKQVQCPPQRA

SEQ ID NO: 8539 - DNA, 297 bp, Homo sapiens
gatcacgtcttacaagtctacgaaaaagataacgaagatattatgttcagtaaaatattaagagttatggactgtagattgaattcaaaatccaactttcctgattttccactaaagaaatacctgaaaaataattttggtcaaatcagtgacgtttctatagtggatgcacaggaaaacgaaatctgtggcaaatgtgaggaaggaaggttagaacctctcaaaagtattgaggtaggccacatatttttgctgggtaataaatactcgaagccgttaaatgtcaagtttgtcgac

SEQ ID NO: 8540 - protein, 99 aa, Homo sapiens
DHVLQVYEKDNEDIMFSKILRVMDCRLNSKSNFPDFPLKKYLKNNFGQISDVSIVDAQENEICGKCEEGRLEPLKSIEVGHIFLLGNKYSKPLNVKFVD

SEQ ID NO: 8541 - DNA, 204 bp, Homo sapiens
  misc_feature (1)..(1): Wherein n may be a, c, g or t
ncggaccgcagggggagttccttcctcaggagactgcagtctttgctcttacggccttcgacagattggatgaagcccgcccacgctatggagggtaacccgctgcattcaaagtctacagatttaactattaatatatctaaaaaacagcctcacagaaacaccagactggtgtttgaacaaaaactgagtaccacagctagc

SEQ ID NO: 8542 - protein, 68 aa, Homo sapiens
  misc_feature (1)..(1): Wherein Xaa may be any naturally occuring amino acid
XDRRGSSFLRRLQSLLLRPSTDWMKPAHAMEGNPLHSKSTDLTINISKKQPHRNTRLVFEQKLSTTAS

SEQ ID NO: 8543 - DNA, 253 bp, Homo sapiens
  misc_feature (253)..(253): Wherein n may be a, c, g or t
gccggcatactccagcccatgtgagtcactttcttgatagaatggtgtcaactcaatccaacaatgttcaccgcttatatcagagtcatcaatcaaccggagtcttctccaaaccctggctccctgtctgatagatggctaaaccaaatggcggtgggcaaactccctacgcctaccaactgggctccttctttgacatattcttggtttctccttaaagaaggttgaatagccaatgtagtgtctgcctggn

SEQ ID NO: 8544 - protein, 54 aa, Homo sapiens [sequence omitted]

SEQ ID NO: 8545 - DNA, 301 bp, Homo sapiens
gctagcaacagccaccactgggcccagcaaagccaagtaaggagcaggatggggttgggggaaggaggagggtaggaggcaacgcccctccctgtgccccaccctgagggcctgatgaagatatgttccaggacatctcggacacccagcagggacagtcagaagctcacctcccgagactcaggcaagggctgccttcctccagtgcggggaggactggaggacacggatggggtggctgtgcggaaggacagaggtgggaagagactgagggtcagagtacgcttgggtccctgaggtt

SEQ ID NO: 8546 - protein, 60 aa, Homo sapiens [sequence omitted]

SEQ ID NO: 8547 - DNA, 324 bp, Homo sapiens
  misc_feature (324)..(324): Wherein n may be a, c, g or t
acgcgtgtacagggtgttgagtttgcgaattcgcaaccgggccatgacgctgccagattgcttaggtcagaggattatctcgaccgttggccagtagcgcagtcgatgtaccgggctatcaagacagcgcctgccgggctttccccgcgcatcggtttgtacggcgagtggggggcaggaaagaccagcgtgttgaactttctgcacaacattgcgatggccaatgaggacgtggtcgtccatgtatctgcagggcgcgcggcagatgttgacaattttataagcactctctgtaacaagatgagcgtcgaaataagacgcatn

SEQ ID NO: 8548 - protein, 108 aa, Homo sapiens
  misc_feature (108)..(108): Wherein Xaa may be any naturally occuring amino acid
TRVQGVEFANSQPGHDAARLLRSEDYLDRWPVAQSMYRAIKTAPAGLSPRIGLYGEWGAGKTSVLNFLHNIAMANEDVVVHVSAGRAADVDNFISTLCNKMSVEIRRX

SEQ ID NO: 8549 - DNA, 351 bp, Homo sapiens
gaattctttctaactataaaggaaaaaataatcctaatgctactcaatgtgtgtgagaatatagtaaaagaaggcatttttttcttatgaagtgataaaaatctgataataaaacctgacaaaggcaagagtcatgtaggacccaggatccctctctttctgggcctaacttcttggcatgtagcttccattttcagagtcatcttgtggttccaaaatgacttctacaactccaattatcatgttgtacagaggaagagtacagagggtacttgccagtttcatcagctttcctaaaagccctgcccagtgactcctaggtaaattgctgtggcccatgtgtggacgcgt

SEQ ID NO: 8550 - protein, 57 aa, Homo sapiens [sequence omitted]

SEQ ID NO: 8551 - DNA, 458 bp, Homo sapiens
accggtgaactgtccttcgagatcgtcgacggcgacctgctcctgcacgtggaagtggacgatgaacccatcgcccacgtgcgcgctccaggcaagtgggacgacggaaactggcatgacctggtagcaatcagtggcaggggcgccattgatctctatgttgacggtttcctcgtggctcacgagcctggtgaggcattccttgccgatcttggcaaggtcgaaagggtgaccgtcgggaaggacctcgaaggagcacggctattcggggaagcgcagacggcatccatcttcagcagtgcgctgaccgacgcccaagtcaaacgcctagccaacgtggctcctctacgtacccaagctctcttcgacacgggatatttgggctcgaaaagttaccggatcccatcgctaatcagacttgattccggaagctttatcgccggggcagaccaacgcgt

SEQ ID NO: 8552 - protein, 152 aa, Homo sapiens
TGELSFEIVDGDLLLHVEVDDEPIAHVRAPGKWDDGNWHDLVAISGRGAIDLYVDGFLVAHEPGEAFLADLGKVERVTVGKDLEGARLFGEAQTASIFSSALTDAQVKRLANVAPLRTQALFDTGYLGSKSYRIPSLIRLDSGSFIAGADQR

SEQ ID NO: 8553 - DNA, 278 bp, Homo sapiens
tgtacagaaaaaaatcacaataaagaagcccccaatgcccaaaaccaaagatgcaacctccgaagcacttgggaagtcatccaggaatctgaggacttcaagcaaaccactcccatgacagcccagccacccgcacccaccttctcactgctgcaaaccagacaaagaatcgtgtgcctcgttcttgataagtccgggagcatgcagagcgataaccgtcttaaccgaatgaatcaggcaagccggcttttcctgctgcagaccgtggagcaggatcc

SEQ ID NO: 8554 - protein, 92 aa, Homo sapiens
CTEKNHNKEAPNAQNQRCNLRSTWEVIQESEDFKQTTPMTAQPPAPTFSLLQTRQRIVCLVLDKSGSMQSDNRLNRMNQASRLFLLQTVEQD

SEQ ID NO: 8555 - DNA, 348 bp, Homo sapiens
  misc_feature (308)..(308): Wherein n may be a, c, g or t
  misc_feature (343)..(343): Wherein n may be a, c, g or t
agtacatttatgagccgagtcctataggtataaatgaaaccgaaacaaaaatttaattcttactccagctgcctgggatgtgctgtatgctatattatattatttgtatattttatttaatgcttcctggtatgtgtcacttatgcagtttcagaaacccagctttagatcacttgaatgtttgttcatcactgatttgttgggagagtaaaagaaatgagacagtttcttttctgcctcagtgaatctgccttttcttttgtctcttctgtgcttctcatttctttccccattcaatataagctgtncaatgacttagagaactgggtactgctggaaacancactg

SEQ ID NO: 8556 - protein, 55 aa, Homo sapiens
MCCMLYYIICIFYLMLPGMCHLCSFRNPALDHLNVCSSLICWESKRNETVSFLPQ

SEQ ID NO: 8557 - DNA, 271 bp, Homo sapiens
ggatccctggaaaccgaccagaaaggaatgagaggagcagaccgaggctgtcagctggcagcggccccagcctggggtcccttccctatctcatggggaactcctcgatctggtcatgggagaagactccaaaatcgggccatttcatagggagagctttggatgtggcgctgtgatgggggttgtggcttgtctactggcacacggtacccactctccagccatcttcagccatgaggcctgggcagaggctcggtcaccccccacgcgt

SEQ ID NO: 8558 - protein, 52 aa, Homo sapiens
MGEDSKIGPFHRESFGCGAVMGVVACLLAHGTHSPAIFSHEAWAEARSPPTR

SEQ ID NO: 8559 - DNA, 348 bp, Homo sapiens
tgatcaacgcctcttggttaggccctgcggcgtccttgcgagccagagccatggcttgtgtgaggttcaaccgtgcatcgcccgctatcgcacagccaaggcgcaagttcatccagccggtagagccgaccttgatgaattccgggtcgcggttgagtacttgcgcggtatcggcaggtacggtggggtctcgctggaccagcatctcgggtgccgactgggcgagaaaaaggtgggccatcaatgccgagaccttggcgtcgacacctctgccttccaaatgtttctcgacgctctcgcgcacctctttaagcgtacgacccagattttccggctgatacaacgcgt

SEQ ID NO: 8560 - protein, 95 aa, Homo sapiens
MACVRFNRASPAIAQPRRKFIQPVEPTLMNSGSRLSTCAVSAGTVGSRWTSISGADWARKRWAINAETLASTPLPSKCFSTLSRTSLSVRPRFSG

SEQ ID NO: 8561 - DNA, 282 bp, Homo sapiens
  misc_feature (282)..(282): Wherein n may be a, c, g or t
gcgacaagtgtcgaagcgattgcgaaagcagcaaatgaagttggagcctgggttatccattactcgactgattacgtcttccctggaaatggcaatatgccatggctggagacggatgcaaccgcaccactaaatgtttacggtgaaaccaagttagccggagaaaaagcgttacaggaatattgcgcgaagcatcttattttccggaccagctgggtctatgcaggaaaaggaaataacttcgccaaaacgatgttacgtctggcaaaagagcgtgaagan

SEQ ID NO: 8562 - protein, 94 aa, Homo sapiens
  misc_feature (94)..(94): Wherein Xaa may be any naturally occuring amino acid
ATSVEAIAKAANEVGAWVIHYSTDYVFPGNGNMPWLETDATAPLNVYGETKLAGEKALQEYCAKHLIFRTSWVYAGKGNNFAKTMLRLAKEREX

SEQ ID NO: 8563 - DNA, 198 bp, Homo sapiens
  misc_feature (1)..(1): Wherein n may be a, c, g or t
  misc_feature (2)..(2): Wherein n may be a, c, g or t
nntccggagctcagcccaatccctgcgagcccaggacaggctgcccccctgctccccaagaagggcattctcaagaagccccgacagcgcgagtctggctactactcctctcccgagcccagtgaatctggggagctcttggacgcaggcgacgtgtttgtgagtggggatcccaaggagcagaagcctccgcaagct

SEQ ID NO: 8564 - protein, 66 aa, Homo sapiens
  misc_feature (1)..(1): Wherein Xaa may be any naturally occuring amino acid
XPELSPIPASPGQAAPLLPKKGILKKPRQRESGYYSSPEPSESGELLDAGDVFVSGDPKEQKPPQA

SEQ ID NO: 8565 - DNA, 327 bp, Homo sapiens
  misc_feature (17)..(17): Wherein n may be a, c, g or t
  misc_feature (194)..(194): Wherein n may be a, c, g or t
  misc_feature (202)..(202): Wherein n may be a, c, g or t
  misc_feature (210)..(210): Wherein n may be a, c, g or t
  misc_feature (242)..(242): Wherein n may be a, c, g or t
  misc_feature (323)..(323): Wherein n may be a, c, g or t
aagcttaagaatgcgcncccaacatagcctcatgcagtcctgatgacatgtgcccaaggtggttgggatacagcttactctcacacattttagggagacataatacatcaatcaatacatgtaagattggttggatctggaaaggcagacaacgagaagcgggtgaggggtggcttccaggtcataggtagatntaaagatnttctgatntggcactggttattatctaaagacctaaaatncatagaaacgaatgtctgggtttgcataagaggttgtggatacccaattgatcgtggagattaagcctcccagaggtaatntcag

SEQ ID NO: 8566 - protein, 53 aa, Homo sapiens
  misc_feature (10)..(10): Wherein Xaa may be any naturally occuring amino acid
  misc_feature (20)..(20): Wherein Xaa may be any naturally occuring amino acid
  misc_feature (23)..(23): Wherein Xaa may be any naturally occuring amino acid
  misc_feature (26)..(26): Wherein Xaa may be any naturally occuring amino acid
MQTQTFVSMXFRSLDNNQCXIRXSLXLPMTWKPPLTRFSLSAFPDPTNLTCID

SEQ ID NO: 8567 - DNA, 319 bp, Homo sapiens
gggcccggctgtgagagacaccgggtgatgccactcaaggcaatgggaacagcaactcccatgctccaaccacagccaggacaccttatcctcctgcctctgaggccctggtcatgggattgtggtcctttggccgctttattctgtaccaaaccctcggtccaacacactaacacggaatccctgccaacctcaaagaagcctagtcagggaagaacagtccatgcagctgctgatgtccatcatggcaccggcaggctgagaccagggctcggctctggacagccttcttcctctgctccggcttttagcatctaga

SEQ ID NO: 8568 - protein, 96 aa, Homo sapiens
MPLKAMGTATPMLQPQPGHLILLPLRPWSWDCGPLAALFCTKPSVQHTNTESLPTSKKPSQGRTVHAAADVHHGTGRLRPGLGSGQPSSSAPAFSI

SEQ ID NO: 8569 - DNA, 580 bp, Homo sapiens
  misc_feature (1)..(1): Wherein n may be a, c, g or t
  misc_feature (2)..(2): Wherein n may be a, c, g or t
nngtcgaccaggactgaacccgtcggcgcgaagtaccgccccgagaggcgaagaaccggcgcgacttcaaggagagggcatgcgcgaacatttcaacgatggggtcgagttcgctcgcttcctcgctcatcgcttcgtcaccgacaaggctcccacagcgcggcggcgctgacctacaccacgttgttcgcggtagtgccgatgatgacggtgatgttttccatgctttcgctgattccggcattccatggcatgggcgagtcgatccagactttcatctttcgcaatttcgtgccttccgctggagaagcggtggaaacctacctgaagagtttcaccacccaggcccggcacctgacctgggtcggggtggtctttctggcagtcaccgccttcaccatgctggtgaccatcgagaaagccttcaaccaatttcgggggggttccccaacccgccgcggtgtagggcggttcctcctctactgggcgatcctcagcctgggcccattgttgctcggggccggcttcgccgtgaccacctacatcacttcgctgtcgctgctccatggcccggacgcgt

SEQ ID NO: 8570 - protein, 193 aa, Homo sapiens
  misc_feature (1)..(1): Wherein Xaa may be any naturally occuring amino acid
XSTRTEPVGAKYRPERRRTGATSRRGHARTFQRWGRVRSLPRSSLRHRQGSHSAAALTYTTLFAVVPMMTVMFSMLSLIPAFHGMGESIQTFIFRNFVPSAGEAVETYLKSFTTQARHLTWVGVVFLAVTAFTMLVTIEKAFNQFRGGSPTRRGVGRFLLYWAILSLGPLLLGAGFAVTTYITSLSLLHGPDA

SEQ ID NO: 8571 - DNA, 421 bp, Homo sapiens
tccggagaaaagtctctcttcccttgctctcagggtgaacgtgattatttttcaggtgtctgatgatcctggccttagatggggaccagaattacaatccaggaggcagcttttctggatttcttgtttttcctctggaaggaactcatcaccgcaacaaagagtgtaaaacaaagagaaagaagggataggaggaaaggagagaaaacatcaaggcaaatcatcaagttgtatgaataatctataatggtgtagacagtaaggaacctggggacaggagctatcacttaacaaaaatgccccaatatctacatggctccagccttagagtaaagaacagcacacaaggggtgggggatatctttgattaactagtttttggcaaatatttacttagaaagataatcccattttgtgatca

SEQ ID NO: 8572 - protein, 53 aa, Homo sapiens
MGTRITIQEAAFLDFLFFLWKELITATKSVKQRERRDRRKGEKTSRQIIKLYE

SEQ ID NO: 8573 - DNA, 1890 bp, Homo sapiens
aaagtacaagtcataaaggcaataaatatacaaatagagtttaacctctgaaacacttgaccgcaatgttctgaggtaaaaacaacaaaccagccattgaagggaagaacagattgacagtgcatataacacagaaagaagtagtaatcaaactatttaaaattgcctaataaatcaaaaagaaaagaccaaaaaaggaaccctaaggtttcaggaaatcaacacagagtatttcgcctaaaattaccagatcccaacagatttgcattagctgatatgtctgtttacaaccctgacaaagaacgtttggtttgggcctgtagaggcttagaaataggtaggggccagccattgggtgtagggagcactggtcacccttatttcaataaagtaaaagatacagaaaacagtaatgcatacataacattttctaaagatggacagaatacagcattttctaaagatgacagactgaatacatcctttgatcctaaacaaatccaaatgttcattgtaggatgcacaccttgcataggagagcattgggataaagctgtgccttgtgcaaaaaatgaccagcaaactggcctttgtcctcctattgaattaaaaaatacatatatagaagatggtgatatggcagatataggttttggaaatatgaactttaaggcacttcaagatagtagatcagatgtcagtttggatattgtcaatgaaacttgcaaatatccagattttttaaagatgcaaaatgatatctatggcgatgcctgctttttttatgctcgtagggagcaatgttatgctagacacttttttgttagagggggtaaaactggtgatgacattccaggtgcacaaattgacaatggtacatacaaaaatcaattttacattccaggagctgatggccaagctcaaaagactatcggaaatgccatgtatttcccaactgttagtggctcattagtttccagtgatgctcaattgtttaacaggcccttctggctccaaagagcccaaggtcataataatggcatcctgtgggctaatcaaatgtttatcacagtggttgacaacacaagaaatactaatttcagtatttctgtatataatcaagctggaccactaaaagatgttgcagactataatgcagagcaatttagagaatatcaaagacatgtagaagaatatgaaatatctttaattttacaactttgtaaggttcctttaaaggcggaggtattggcacagatcaatgcaatgaactcctctttattggaagattggcagttaggatttgttcccactcctgataatccaattcaggatacctacaggtatattgactctttggctacacggtgtccagataaaaatcctccaaaagaaaaggaagacccttataaaggcttacatttttgggatgtagatttaactgaaagattgtcattagatttagatcaatattccttaggcaggaaatttttattccaagctggtttacaacacacgaccgttaacggtacaaaagcagtgtcttataaagggtctaatagaggaacaaagcgcaaacgtaaaaattgaggcctgaccgaaagtggtacatttttataaacttttacacagtattcaaggaatgtttgtttactctgactaagtataagtcttccaaggataccgaccgcacccggtacactcagtcaggttgttgccaatatagaatcagatcggtgccaaacacaccgtcttggactcagaacagaccgtgttcgttataacatgctcggattagggacttcgccaaagaagatttaatctacaatcgcttttggcaatcacatttggcactgctaaaggaccgttaacggtaagtagcaagttcct

SEQ ID NO: 8574 - protein, 480 aa, Homo sapiens
SNYLKLPNKSKRKDQKRNPKVSGNQHRVFRLKLPDPNRFALADMSVYNPDKERLVWACRGLEIGRGQPLGVGSTGHPYFNKVKDTENSNAYITFSKDGQNTAFSKDDRLNTSFDPKQIQMFIVGCTPCIGEHWDKAVPCAKNDQQTGLCPPIELKNTYIEDGDMADIGFGNMNFKALQDSRSDVSLDIVNETCKYPDFLKMQNDIYGDACFFYARREQCYARHFFVRGGKTGDDIPGAQIDNGTYKNQFYIPGADGQAQKTIGNAMYFPTVSGSLVSSDAQLFNRPFWLQRAQGHNNGILWANQMFITVVDNTRNTNFSISVYNQAGPLKDVADYNAEQFREYQRHVEEYEISLILQLCKVPLKAEVLAQINAMNSSLLEDWQLGFVPTPDNPIQDTYRYIDSLATRCPDKNPPKEKEDPYKGLHFWDVDLTERLSLDLDQYSLGRKFLFQAGLQHTTVNGTKAVSYKGSNRGTKRKRKN

SEQ ID NO: 8575 - DNA, 192 bp, Homo sapiens
agatctaataacgaccaaatgaccggacctgccaggcacttagcgagccattctgcttatggctctttaatagctcttggagttctgctaagaggagagcggaaaactccagcttccccggaaagaaagtcctgcgccgggagcgcggagaggcgcgcggagcgtggccccatctcccgcaatcccgccggc

SEQ ID NO: 8576 - protein, 58 aa, Homo sapiens
MTGPARHLASHSAYGSLIALGVLLRGERKTPASPERKSCAGSAERRAERGPISRNPAG

SEQ ID NO: 8577 - DNA, 566 bp, Homo sapiens
  misc_feature (1)..(1): Wherein n may be a, c, g or t
  misc_feature (2)..(2): Wherein n may be a, c, g or t
nnggcgccatttctgttcagctttgggcactgcggctcccggcgtctgggatgccatgatggcgcgttccaacatcgcgttgcggccggtgatccgcacctcgcggtcgccgacctcgacgcggtcgacgagcaggtggatgtattctttgtgcgtggcgacaactacgatggccggttgagcggcaactatgatggccggtaggatcggttgtctgggctgatcgtagggaggggcgtagccctgaccggagagcggaccagacaaccgatggcgatctttttccccttcttttggggggctgatcggggctgtggcgggcggtggtatcggaacactcatcgaacaacgagcgatgggtttgcgatgccgggccaccacatttccgatcagcaggtatttctcttcatgacccatcgtcgccaacacacccaggccgtcgcggctgccaaggccggtatcagcgagcgcagcgcacgccggatcgagaacgatccgcagcttccgtcccagaagaagaaggagcgccactggcgcacccgcgccgatccgctcgagccattctg

SEQ ID NO: 8578 - protein, 66 aa, Homo sapiens
MPGHHISDQQVFLFMTHRRQHTQAVAAAKAGISERSARRIENDPQLPSQKKKERHWRTRADPLEPF

SEQ ID NO: 8579 - DNA, 386 bp, Homo sapiens
cctagggacacttaacattgttaatagcaaaaagctgaaaaacaaccaaatttctatgacaggagaatggaaaaatattttggtatatttatacaattggatagtagagagcagtgtacataaatgaataatacacacatgtaccaatatggataaatctttgaaacacaatgttgatttgaaagtatgacttattttttataaaactaatagcattcaaagctaaacagtttgtgtttagggatgtgtaagtgtgtaataaaatcaacatatacacacacacacagactttacaaggatggttatctttggtttggaattcaggtggaaggatagttgaagagctcggtggcagacaggtgttagttctgacctagatcgtcgga

SEQ ID NO: 8580 - protein, 60 aa, Homo sapiens
MLILLHTYTSLNTNCLALNAISFIKNKSYFQINIVFQRFIHIGTCVYYSFMYTALYYPIV

SEQ ID NO: 8581 - DNA, 197 bp, Homo sapiens
  misc_feature (1)..(1): Wherein n may be a, c, g or t
ngtccattctttccaacccccacagcccagcccagcccagccctgacctctagccccactgactcccagccccctgtaagtctgcagcctccaaagctgtacagtgaagctcccctgtctcttcctggccgcatccccaagcctgcctcgacacccagacctgcccaccctgttcccaggcccgggcacccacgcgt

SEQ ID NO: 8582 - protein, 65 aa, Homo sapiens
  misc_feature (1)..(1): Wherein Xaa may be any naturally occuring amino acid
XPFFPTPTAQPSPALTSSPTDSQPPVSLQPPKLYSEAPLSLPGRIPKPASTPRPAHPVPRPGHPR

SEQ ID NO: 8583 - DNA, 354 bp, Homo sapiens
  misc_feature (180)..(180): Wherein n may be a, c, g or t
tgatcaattctctgtgttgctcatgaactcggatgctccagccccttgaggagctcccagtgtatccttatgtctttgggggcggccagttgaaaaacaagcatttccttccacgtgtctatgtgcgcaggtatctttccaccatctgtccactggaactggtcttactgaggtggcccnccaattgccagatgcaccagacactttttggtgcctttattagattcctgctgcattcagttcacttggctctttcccctctctcatccctggcttactggtacacttgttcctgttctcccatctcctctgactgggttttccgactctctacgctctgtgatcctgtccccg

SEQ ID NO: 8584 - protein, 107 aa, Homo sapiens
  misc_feature (50)..(50): Wherein Xaa may be any naturally occuring amino acid
MLQPLEELPVYPYVFGGGQLKNKHFLPRVYVRRYLSTICPLELVLLRWPXNCQMHQTLFGAFIRFLLHSVHLALSPLSSLAYWYTCSCSPISSDWVFRLSTLCDPVP

SEQ ID NO: 8585 - DNA, 198 bp, Homo sapiens
gtgcacccacatggttcctacagccgtctgccctttactgcccttggctctggtcaggatgcagccgtggcactgttggaagaccggttccagccaaacatgacgctggaggctgcgcaagagctgttggtggaagccatcacagcagggatcctgagtgacctgggctctgggggcaatgtggatgcctgtgtgatc

SEQ ID NO: 8586 - protein, 66 aa, Homo sapiens
VHPHGSYSRLPFTALGSGQDAAVALLEDRFQPNMTLEAAQELLVEAITAGILSDLGSGGNVDACVI

SEQ ID NO: 8587 - DNA, 348 bp, Homo sapiens
cccaaggccccgctagtcctggaacaagggctgaggggaacccacatggagaacgcctatgacttctacaaaccaaacttggcctcagagtatccactggtggatgggaagctgtctatccagtgctacctgcgggccttggaccgatgctatgcagcttaccgcaggaaaatccagaatcagtggaagcaagctggaaacaaccagcctttcaccctcgatgacgtgcaatatatgatcttccacacacccttttgcaagatggtccagaaatccctagctcggctgatgttcaatgacttcctgtcatctagcagtgacaagcagaacaacttatacaagggtcta

SEQ ID NO: 8588 - protein, 116 aa, Homo sapiens
PKAPLVLEQGLRGTHMENAYDFYKPNLASEYPLVDGKLSIQCYLRALDRCYAAYRRKIQNQWKQAGNNQPFTLDDVQYMIFHTPFCKMVQKSLARLMFNDFLSSSSDKQNNLYKGL

SEQ ID NO: 8589 - DNA, 334 bp, Homo sapiens
cccgggctgacgggcagcgactacgggcgctgggccagcgtcgcggcgatcgcgctggccgcgtcctggatcaccgatgtcgcggcattgcgacgagcccagccgtcccggctggccacctgcctgcccgcgatcatcgcactcgccgcggtgtccgcgatggcagtgcagacggcgccgcgcctgctgcatcaccaattcacgacgtgggacgtcttcctcggctacgaactgcccgacccgccgaatgtggttcggctgctgacggtctggcggttcgacacgttcatcggcatcggggcgatcgtgctcgccggcgcgtatgtgtacgcgt

SEQ ID NO: 8590 - protein, 111 aa, Homo sapiens
PGLTGSDYGRWASVAAIALAASWITDVAALRRAQPSRLATCLPAIIALAAVSAMAVQTAPRLLHHQFTTWDVFLGYELPDPPNVVRLLTVWRFDTFIGIGAIVLAGAYVYA

SEQ ID NO: 8591 - DNA, 289 bp, Homo sapiens
ccatggccttcctttggtctgtaaagaagaaccacattgccaggggctcaggtcagaaacccgggggtcattcttcactcttctttcttttacccctcacatccaatccatcagcaaagccagatggtttggccaacaatatgaatccagaatctgaccacttctcgtcaccacttttctgagtcaccgagaggcatcggtggtccgatgaccccctgggtcatcagaagagcctccttttagtctcagcctcagccttgccctcctacaccagccagagtgaacgcgt

SEQ ID NO: 8592 - protein, 59 aa, Homo sapiens
MAFLWSVKKNHIARGSGQKPGGHSSLFFLLPLTSNPSAKPDGLANNMNPESDHFSSPLF

SEQ ID NO: 8593 - DNA, 624 bp, Homo sapiens
  misc_feature (1)..(1): Wherein n may be a, c, g or t
naagcttcagtaccgattgtattccctgaaaggtctaatttggtacaggttttcaaagctgccaattcttccaggtatggtttgatatcgtcactggttgttaacttgagtgccttcccagagatggagtaaacttgttcttcctcgtgctgaggaacgaagtgcaaggtagccatagctaaaaatctgtttcgaaagacagcctgttaaaatggcctatattcaccttttaccgggatattatgcctttgatcaatatcttcctaataaatttttttccattaattgtcccacaacgtgcatagtgacatgcattccatgaccaaactaagagctttaaatcaaaagtagaatttgacattatgaaacaacacgacaacaagaaaagactagaggacttcacagaccattatgaacggcggaggcaagaatgttttgaataaaaactcagtgggctcagtatcagaagttggtccggactcaacacaagaggaaacgccacgagatgtccgtcttttgcatctgctcctcgcatcacagtcgattcatcaatatgaggaccaagtaccgctacaattgatggattttgcacataggtacacacaaggagtccttaaggacgcg

SEQ ID NO: 8594 - protein, 71 aa, Homo sapiens
MNGGGKNVLNKNSVGSVSEVGPDSTQEETPRDVRLLHLLLASQSIHQYEDQVPLQLMDFAHRYTQGVLKDA

SEQ ID NO: 8595 - DNA, 161 bp, Homo sapiens
tcatgaatggtactaaggtccttacgaagaaggcttcatgcagcatttggctagcttgctgtaccaaattgctgtactaccttctgccatgcaaggacacagcattcttctcctttgagggtgcagcaatgggtgccatcttggaaggagggagcagatct

SEQ ID NO: 8596 - protein, 53 aa, Homo sapiens
MNGTKVLTKKASCSIWLACCTKLLYYLLPCKDTAFFSFEGAAMGAILEGGSRS

SEQ ID NO: 8597 - DNA, 203 bp, Homo sapiens
atcacctcgaacaatgagaaggagctgccggacgcgttcctgcgccgctgcttcttccattacatagcctttcccgaccgcaccacgatgcaggcgatcgtggacgtgcattttccgggcatcgagaagcggctggtcgcccgggcgctggagatgttctacgagatccgcgacatgccggggttgaagaagaagccgtcgac

SEQ ID NO: 8598 - protein, 67 aa, Homo sapiens
ITSNNEKELPDAFLRRCFFHYIAFPDRTTMQAIVDVHFPGIEKRLVARALEMFYEIRDMPGLKKKPS

SEQ ID NO: 8599 - DNA, 305 bp, Homo sapiens
  misc_feature (1)..(1): Wherein n may be a, c, g or t
  misc_feature (282)..(282): Wherein n may be a, c, g or t
ncgccatcggcatgatgtcaggcaaagatgatcctggcatggcaaaggtatacggttttgttgacacgtccctgacgatccctatccgctcatctggagacccatgcgttccttggaccccaattgcctacgaaaaaattttttttttcccccccaaaaaacacccccccctcgcatctgtgaaagttctacctcggggtcgtcatctcggctgtcatcgtcggcaaatcactcagctggccgtacccttcgtcatcgcccgggccaccgacctcgacggcncagcgtgcacggcaacgaccacc

SEQ ID NO: 8600 - protein, 98 aa, Homo sapiens
  misc_feature (91)..(91): Wherein Xaa may be any naturally occuring amino acid
MMSGKDDPGMAKVYGFVDTSLTIPIRSSGDPCVPWTPIAYEKIFFFPPKKHPPLASVKVLPRGRHLGCHRRQITQLAVPFVIARATDLDGXACTATTT

SEQ ID NO: 8601 - DNA, 309 bp, Homo sapiens
aattggagttacatgaagaaagggctgaccgtatggttagatgtcccactggatgcacttgcaagaagaattgctgctgtaggaaccgcgtctcgaccactcttgcatcaggaatccggtgatccttatgcaaaggcttatgcaaaacttacgtcactttttgagcaaagaatggactcgtatgctaatgctgatgccagagtttcacttgaacatattgcattaaaacaaggccataatgatgtcactatacttacacctagtaccatcgccattgaggcattgctaaagatgggaagttttcttacc

SEQ ID NO: 8602 - protein, 103 aa, Homo sapiens
NWSYMKKGLTVWLDVPLDALARRIAAVGTASRPLLHQESGDPYAKAYAKLTSLFEQRMDSYANADARVSLEHIALKQGHNDVTILTPSTIAIEALLKMGSFLT

SEQ ID NO: 8603 - DNA, 241 bp, Homo sapiens
tgatcactccaggactcatatttttcaactgtaagttgattgttggtctagatattctccaaggtaccatctagacaagagggttggtgattctacgctgatgtctacaaacaagagctggaagaaatgatgatctttttttttttttaaaatggactttgctcttaaaaggaggcattggctttgaaattaggactctaatctcatctaggaggctaattttcagcatggagtttgtaca

SEQ ID NO: 8604 - protein, 52 aa, Homo sapiens [sequence omitted]

SEQ ID NO: 8605 - DNA, 336 bp, Homo sapiens
  misc_feature (283)..(283): Wherein n may be a, c, g or t
  misc_feature (284)..(284): Wherein n may be a, c, g or t
  misc_feature (310)..(310): Wherein n may be a, c, g or t
  misc_feature (311)..(311): Wherein n may be a, c, g or t
aactagggggaaggtgcatttcctcccgttagtatccacgtgcagaaaagccccgctcctccacagtcagggagacccgggacctatgacccccgcgcaaaggcgcctatggcgggggctgagccagagccagacgccagggctgcccccgaaaacccgggtctttccgcccctgcgccgccaccgccaaccggcccctcccacggcgctctccgtccgtcccggcccaggtgtctgccatccccgccctggccaccaggctgaagccacgaggatggggcgnngggcagcgctgggtcccccggcccgnngccacctacctccgtcccgccggcc

SEQ ID NO: 8606 - protein, 85 aa, Homo sapiens [sequence omitted]

SEQ ID NO: 8607 - DNA, 366 bp, Homo sapiens
  misc_feature (1)..(1): Wherein n may be a, c, g or t
  misc_feature (265)..(265): Wherein n may be a, c, g or t
  misc_feature (266)..(266): Wherein n may be a, c, g or t
  misc_feature (366)..(366): Wherein n may be a, c, g or t
naccttccgttcggtgtcgtcgttgttgacgaagcatcaatgctttctctgcctctggccgctagcctcctctctgcaatcgggcctcaaactcgtttaattctcgtcggggacccagggcagcctgtctcggtggacgccggtagcgtgttggccgacatcgtttcgtcggctgatgccctccaagcgcacgttcctgtcacgatcctcacctgtaaccaccgctcgagaggagatatcgcacggctgtcggaagcggtaccanngggagacaagagcgctgcgttggacgtattggcgacacctgctggagtgacacacgactctccttccctcgattgcatcgcgacgatcagtggccgtcgn

SEQ ID NO: 8608 - protein, 122 aa, Homo sapiens
  misc_feature (1)..(1): Wherein Xaa may be any naturally occuring amino acid
  misc_feature (89)..(89): Wherein Xaa may be any naturally occuring amino acid
XLPFGVVVVDEASMLSLPLAASLLSAIGPQTRLILVGDPGQPVSVDAGSVLADIVSSADALQAHVPVTILTCNHRSRGDIARLSEAVPXGDKSAALDVLATPAGVTHDSPSLDCIATISGRR

SEQ ID NO: 8609 - DNA, 324 bp, Homo sapiens
gccggcaacagtgggatagatagccgttgcaccataggcgagctgaatgtgatcaatgcgtctactaatgtgtctcctggccatgtgactttctctcttgatcttcgagagtcatccgttgagcaattacatgaattgcagacaaaagctttcgaagccattcaccgcattgcttatcaccacaaattagaaatcaatattaaagagtcatggtcacttccgccttgtccattcgatgctacttgcttgtctaacattaaactggcttgtgatggggtttacccggatataaaagcacattctctcgtcagtggagcgggtcat

SEQ ID NO: 8610 - protein, 108 aa, Homo sapiens
AGNSGIDSRCTIGELNVINASTNVSPGHVTFSLDLRESSVEQLHELQTKAFEAIHRIAYHHKLEINIKESWSLPPCPFDATCLSNIKLACDGVYPDIKAHSLVSGAGH

SEQ ID NO: 8611 - DNA, 174 bp, Homo sapiens
gtgcaccatgaacaatgttgtcagcactaggacctacgaaagggtgtagcagatgggtagacgccagtaagaacttggccaccacagagaacttgctgctgaagaaactcagctccagggacagtgatttaaaatatcaccaacataagttttgctcaataaaagcactaatta

SEQ ID NO: 8612 - protein, 53 aa, Homo sapiens
MLSALGPTKGCSRWVDASKNLATTENLLLKKLSSRDSDLKYHQHKFCSIKALI

SEQ ID NO: 8613 - DNA, 262 bp, Homo sapiens
accggtgttatggatgccgaactcggtcaatcgcgtctcagcatggaaatccaacatccaaggaatcgatccacaggaccccatgctttacctgtacccgcaggactggaccatcacatgacctcacgcagggtgaagccacgttactgatcccgcccatttcacacggggtcactgggcgccccggtgacgccaccccaacgtcccaatcacccatctacaggagggagcaaaggatgacgcgatacatcgcgcaacgcgt

SEQ ID NO: 8614 - protein, 59 aa, Homo sapiens
MGDWDVGVASPGRPVTPCEMGGISNVASPCVRSCDGPVLRVQVKHGVLWIDSLDVGFPC

SEQ ID NO: 8615 - DNA, 433 bp, Homo sapiens
  misc_feature (1)..(1): Wherein n may be a, c, g or t
  misc_feature (2)..(2): Wherein n may be a, c, g or t
  misc_feature (419)..(419): Wherein n may be a, c, g or t
nntcatgacttggtcgactcgcagacgggcgagtacaaagtccacagcgagaacagtattttcttcgaactggatggtccgtatcgtgcaatgatattgccttccagcaaggaagaagataaactgctgaagaagcgatatgccgtatttgatgaagacggctcccttgccgaactgaaaggctttgaagtgaaacgccgtggcgagctgcagctcatcaaagactttcagaaacaaatctttagcaaatttctgctcggcgacacgctcgaaagctgctatgcggccgtagctcgcgttgcagatcagtggctcgatgtcttatacagtaaaggctcaacgctacatgacgaggagctcattgatttgattgctgaaaacaagagtatgtcgaagctcttgagtgagtatggcgcacnaaaagttcgaccgg

SEQ ID NO: 8616 - protein, 144 aa, Homo sapiens
  misc_feature (1)..(1): Wherein Xaa may be any naturally occuring amino acid
  misc_feature (140)..(140): Wherein Xaa may be any naturally occuring amino acid
XHDLVDSQTGEYKVHSENSIFFELDGPYRAMILPSSKEEDKLLKKRYAVFDEDGSLAELKGFEVKRRGELQLIKDFQKQIFSKFLLGDTLESCYAAVARVADQWLDVLYSKGSTLHDEELIDLIAENKSMSKLLSEYGAXKVRP

SEQ ID NO: 8617 - DNA, 435 bp, Homo sapiens
  misc_feature (1)..(1): Wherein n may be a, c, g or t
naatgcagcagctttgatgcaaacgccaaagcggctttctttttcatccagcaagcaggccgcacactcagtgagggcggcagcattgtgactatcgtgtcttcgcttttggctgcttatacagatagttatgcgatataccctggtagtaaagcggctgtggaacactttacccgggcagcatcaaaggaattcggtgttaggggtatcagcgtgaatgcaatgagccccgggcctatggataccccattcttttacggtcaagaaagcaaagaagccgttgcctatcactcctccgcagcagcgctgagtaacttttccaagaccgggctcactgatattgaagacattgcacccatcgtgcgctttttagtgacagaaggttggtggattaccggacaaaccatttttgccaacggtggatataccacgcgt

SEQ ID NO: 8618 - protein, 145 aa, Homo sapiens
  misc_feature (1)..(1): Wherein Xaa may be any naturally occuring amino acid
XCSSFDANAKAAFFFIQQAGRTLSEGGSIVTIVSSLLAAYTDSYAIYPGSKAAVEHFTRAASKEFGVRGISVNAMSPGPMDTPFFYGQESKEAVAYHSSAAALSNFSKTGLTDIEDIAPIVRFLVTEGWWITGQTIFANGGYTTR

SEQ ID NO: 8619 - DNA, 217 bp, Homo sapiens
agatcttaactgtgtcacctgcaagcccctgggtgagggtttctcagcacgtggaaagagggacatgtcctcagtcatactccacagggatcaggtagggagcttcaggcagttcatagggtggggtctttctgagtttgggtactgtaacaggataacctggacttctctacccagcacatctgggcatgaggctagggatgagagggaaggatcc

SEQ ID NO: 8620 - protein, 51 aa, Homo sapiens
MSSVILHRDQVGSFRQFIGWGLSEFGYCNRITWTSLPSTSGHEARDEREGS

SEQ ID NO: 8621 - DNA, 300 bp, Homo sapiens
  misc_feature (1)..(1): Wherein n may be a, c, g or t
  misc_feature (248)..(248): Wherein n may be a, c, g or t
  misc_feature (262)..(262): Wherein n may be a, c, g or t
ngccagctcccctcccctgccattgagctgctgagtgaatttcgtctgctgcagtcctctctcccttgtgatatccatctggttaatctacggacaatacagtcaaaggtgggcaaaggttactcagatgaggcagccttgatcctccacaggaaggtgtttgattgccagttgtccagcagagccatggggctgccctgttccacgactcagggaaagatgtcaattccaaaacttttcaacaactntgctgtggagagtntcatcccttcctcgctgtccttgatgcactcgcctccg

SEQ ID NO: 8622 - protein, 100 aa, Homo sapiens
  misc_feature (1)..(1): Wherein Xaa may be any naturally occuring amino acid
  misc_feature (83)..(83): Wherein Xaa may be any naturally occuring amino acid
  misc_feature (88)..(88): Wherein Xaa may be any naturally occuring amino acid
XQLPSPAIELLSEFRLLQSSLPCDIHLVNLRTIQSKVGKGYSDEAALILHRKVFDCQLSSRAMGLPCSTTQGKMSIPKLFNNXAVESXIPSSLSLMHSPP

SEQ ID NO: 8623 - DNA, 273 bp, Homo sapiens
gacccgtccccgtccttcgacttcgtctcgggcgtcttctggcccatgctcgccgtctgggtgatcacgctgctcatcatgggcttcggcgtgcgccggggcgtggccctggcctcgatggtcggcatcccgctgctcatcgtgatgttcctgatcctcgtcggcatcgccctcaccctgccgggcgccgcccagggcctggacgccctgttcacgccgaactgggccgcgctcgctgaccccggcgtctggatcgccgcctacggccagatc

SEQ ID NO: 8624 - protein, 91 aa, Homo sapiens
DPSPSFDFVSGVFWPMLAVWVITLLIMGFGVRRGVALASMVGIPLLIVMFLILVGIALTLPGAAQGLDALFTPNWAALADPGVWIAAYGQI

SEQ ID NO: 8625 - DNA, 399 bp, Homo sapiens
  misc_feature (1)..(1): Wherein n may be a, c, g or t
ngcctggccttacgccagaaaggcgtgggcgcacgcatgaacccgcaccaactgatcatgacggccacgccgatcccgcgcacgctggccatgagcgcctacgccgatctcgacacgtcaattctcgatgagctgccgccaggccgcacgccggtcaataccgtgctggtgaccgacacgcggcgtgtggaggtcatcgagcgcgtgcgcggtgcctgcgccgaagggcgtcaggcgtactgggtatgtacgctgattgaagagtcccaagaaactgtccccccccaggtcgcccgaaccacctatgaacccctcaccagtgccttgggcgagctcaaggtcgggctgatccacggccgcatgaaacctgcggaaaaagccgcggtgatggccgaattc

SEQ ID NO: 8626 - protein, 133 aa, Homo sapiens
  misc_feature (1)..(1): Wherein Xaa may be any naturally occuring amino acid
XLALRQKGVGARMNPHQLIMTATPIPRTLAMSAYADLDTSILDELPPGRTPVNTVLVTDTRRVEVIERVRGACAEGRQAYWVCTLIEESQETVPPQVARTTYEPLTSALGELKVGLIHGRMKPAEKAAVMAEF

SEQ ID NO: 8627 - DNA, 276 bp, Homo sapiens
  misc_feature (1)..(1): Wherein n may be a, c, g or t
  misc_feature (2)..(2): Wherein n may be a, c, g or t
  misc_feature (196)..(196): Wherein n may be a, c, g or t
nngttccagtccaatcaagctgcctatcagctcgcaatgttcgccggcggtcaggactcttggatcggcacccacatgtgggtcgtcggcgtggtcttcgcgatactcgtcgggattgtcatcgtcgggggtgcctccaagattggcgccgcgacctccaagattgtgccattcatgggcatcctctacgtcatcnatgtcctggccgtcattggcgccaacatctcccaggtcggcagtgcctttgaggccatctggtccggcgccttcaccggt

SEQ ID NO: 8628 - protein, 92 aa, Homo sapiens
  misc_feature (1)..(1): Wherein Xaa may be any naturally occuring amino acid
  misc_feature (66)..(66): Wherein Xaa may be any naturally occuring amino acid
XFQSNQAAYQLAMFAGGQDSWIGTHMWVVGVVFAILVGIVIVGGASKIGAATSKIVPFMGILYVIXVLAVIGANISQVGSAFEAIWSGAFTG

SEQ ID NO: 8629 - DNA, 391 bp, Homo sapiens
acgcgttgggtatctatggtttgtatctgatgaaatggggccgatcggtcggtgggttgacggagtagtaccggattgctccgtaagtggacagtgtggtgcttgtacggtggctgccagacgcggaagacgtccgccgtctcctgagatacacggaggtactctcatgtcatccgctgccacggctgaggaggcgacctccccacgcgctcgcctcattggcaaggggtggatccagggcgtcgccctggtcatgctcttcggattcaccgtcatgggtttgctggcctatcgcacctacaccaactccatgcctcacccggagagggttgtccccgagagcggcgagaccctcttcacgacgcaggacatccccgagggccagaagctt

SEQ ID NO: 8630 - protein, 119 aa, Homo sapiens
MGPIGRWVDGVVPDCSVSGQCGACTVAARRGRRPPSPEIHGGTLMSSAATAEEATSPRARLIGKGWIQGVALVMLFGFTVMGLLAYRTYTNSMPHPERVVPESGETLFTTQDIPEGQKL

SEQ ID NO: 8631 - DNA, 385 bp, Homo sapiens
caattgcctattcatgattattttacttcacactcttcaaccctcttctctccataccatccaactgctctcccttctgatgtaacatgtttgttgttaaagcaaatggaaatgtcttactgacctctccgtgacatttaatcctgttcatcactcttttccttttcaaaaggtgctcttgccttaaaaggacaattcactcttttgatgttcctcttacctttaccactccttctcaggctcataagcccccctcttctcttttcctgaaacgttagtgcttctaaggattccatcctaaaccttctctctatatatacacactaaatcatctcatgtacttgtagagtttcaggtactatcaatatgaaaatgtctcccaaat

SEQ ID NO: 8632 - protein, 52 aa, Homo sapiens [sequence omitted]

SEQ ID NO: 8633 - DNA, 306 bp, Homo sapiens
aagcttcaaaagccaaggttaatcaggacccaaggtggcgcagccctcgtgagcccaaaaagccactcgcgtctgggcgccaacccttaggctctgccttcccagagttcctggttctaaaacccttcaggcaggtgtgtgcccgcagggcctgacaaagggcatcacgttcaggagtttgaggccttgcgaggcccctttgctgtctctgaggatagttgggaaggccttggggcctggatttgacatccatgaactgtgcagcagctcaaacccgggtcagtgttttgacaccaacggcaaaat

SEQ ID NO: 8634 - protein, 76 aa, Homo sapiens [sequence omitted]

SEQ ID NO: 8635 - DNA, 331 bp, Homo sapiens
  misc_feature (331)..(331): Wherein n may be a, c, g or t
cttaaggctctgtttcctcctgccagaggggtaaggcatgttctgaggtgggaggatgtgtggaaatccgattttggagctgctggctctgtggactcctgctgggctcctcctgaggtggaagtaaaggcatcccccatgctcccctctccatctgccttgatgagaagaagaaagtgcagagactagtgccgcagagagctaccctttctggaatccatagagggtctggccttttattcccaggcccaggcccaacccaagcctgggggcccgggttttgtcatgggcacctcctgctgctgtgccctggctgttccacatgagcagn

SEQ ID NO: 8636 - protein, 50 aa, Homo sapiens
MERGAWGMPLLPPQEEPSRSPQSQQLQNRISTHPPTSEHALPLWQEETEP

SEQ ID NO: 8637 - DNA, 327 bp, Homo sapiens
  misc_feature (306)..(306): Wherein n may be a, c, g or t
  misc_feature (311)..(311): Wherein n may be a, c, g or t
  misc_feature (312)..(312): Wherein n may be a, c, g or t
attcaagaaattaaagatcacccttatttcaagaatgtggattgggatcatgtttacgatgaggaagcttcttttgtccctacaatagacaatccagaagatactgattattttgacctaaggggtgcagagctccaagattttggagacgatatcgaaaacgataatgccaatattttgtttggtaaacatggcattaacaccgatgtttctgaattatctgcagctaatctctctccaccattgaatcataaaaatattttatcccgtaaattatcgatgagtaacaccactaataggagctcnaatanntccacagtagcgtgc

SEQ ID NO: 8638 - protein, 109 aa, Homo sapiens
  misc_feature (104)..(104): Wherein Xaa may be any naturally occuring amino acid
IQEIKDHPYFKNVDWDHVYDEEASFVPTIDNPEDTDYFDLRGAELQDFGDDIENDNANILFGKHGINTDVSELSAANLSPPLNHKNILSRKLSMSNTTNRSSNXSTVAC

SEQ ID NO: 8639 - DNA, 159 bp, Homo sapiens
gccggcggttcaggaactatcaaaggctcgaacaataatcgaaatggcgttttaaatttaagtttgaatgagatggacttatcaagaggtgatactggtgctgctgtctcctccttttcatcgtcttcatcgtctgcatcaattcaacaagctaagctt

SEQ ID NO: 8640 - protein, 53 aa, Homo sapiens
AGGSGTIKGSNNNRNGVLNLSLNEMDLSRGDTGAAVSSFSSSSSSASIQQAKL

SEQ ID NO: 8641 - DNA, 450 bp, Homo sapiens
  misc_feature (1)..(1): Wherein n may be a, c, g or t
nacgcgtttttttttgaagttgaaatttcagctacgcatcgagaaagtttatttggcagttttcttttaaagttttgaacctgtttcaataccttatttcctaccatctttcattattcagataatcacttttgggagaaatttggttggcgtcactcgttcttgctaagaaattgtaattggctaaaagtatcaacgagagaacaagcttttgtcgttattcgcttgagcaaatacgtcaaaaataaacgaaaaagaaagagctctatgaaattatctgtcctcacatttgtcgtagatgcattacttgtctgcagctcaatagtagatgccggtgttacagattttccatccttaccaagtaatgaagtctatgtcaaaatgaattttcagaagaaatacggcagttcatttgaaaacgctttggatgatacaaaaggtagaacgcgt

SEQ ID NO: 8642 - protein, 61 aa, Homo sapiens
MKLSVLTFVVDALLVCSSIVDAGVTDFPSLPSNEVYVKMNFQKKYGSSFENALDDTKGRTR

SEQ ID NO: 8643 - DNA, 479 bp, Homo sapiens
  misc_feature (1)..(1): Wherein n may be a, c, g or t
ngctagctacgtcccctccttggatctcaaattatacccattacaacgtccccgccccatccgcccatctgctcagaaccaggaggatgagctggttcatggcaacttgtgtgcttacagggactgcagggccgtcctggagaattggggcctcagggacccactggaccaccgggtgccaagggacaggaaggtgcacatggggctcctggagcagctggaaaccccggtgctcccggacatgtcggtgcccccggtcccagtggccctccaggaagtgtgggtgctcccggcctcagaggcaccccagggaaagatggggagcgtggtgagaagggtgcagcgggggaagaaggcagcccagggccagttggtcccaggggagatcctggtgctcctgggctccctgggccgcccggaaaagggaaggatggagagccgggactccgtggatcacctggactccctggactcctagg

SEQ ID NO: 8644 - protein, 129 aa, Homo sapiens
AGSWQLVCLQGLQGRPGELGPQGPTGPPGAKGQEGAHGAPGAAGNPGAPGHVGAPGPSGPPGSVGAPGLRGTPGKDGERGEKGAAGEEGSPGPVGPRGDPGAPGLPGPPGKGKDGEPGLRGSPGLPGLL

SEQ ID NO: 8645 - DNA, 294 bp, Homo sapiens
  misc_feature (1)..(1): Wherein n may be a, c, g or t
nacgcgttggcttggccggagcggattgactccggcgttgcaccgttggatttgttcgccattgctcgcctggacttcgaggcgccggatgagcaacgcttcccgtgcctgcgtctggcccggcaagcggccgaggcgggtaacagcgcaccggccatgctcaatgcggccaacgaagtggctgtgggggcgtttctcgagcagcgcatgcgacttgcgcacatcgcgagtatcatccaaaacttattgagccttgagcctgtcgtggctgtgaatgattggggggcagcgatc

SEQ ID NO: 8646 - protein, 98 aa, Homo sapiens
  misc_feature (1)..(1): Wherein Xaa may be any naturally occuring amino acid
XALAWPERIDSGVAPLDLFAIARLDFEAPDEQRFPCLRLARQAAEAGNSAPAMLNAANEVAVGAFLEQRMRLAHIASIIQNLLSLEPVVAVNDWGAAI

SEQ ID NO: 8647 - DNA, 188 bp, Homo sapiens
ttgcaaattaaaacatgaatgagtatacacaacttaaatatgataaactatatttaccaaaacttaacatattccttgttataacacatttttatttaaatcaggaacaaggcagtaatgcctttttttttttttttttttttttttttggcaagggaattttgcttttgccttccggggggaaaggc

SEQ ID NO: 8648 - protein, 58 aa, Homo sapiens [sequence omitted]

SEQ ID NO: 8649 - DNA, 397 bp, Homo sapiens
atcagcgccgtgccggggatgaaggcgctcgacatgaacaccgccgaggacgagatcgtgcgcctcacgcgcgaggtcgttcccggcatgatcgtcaccggaatggaggtcgccgagattgacggcgcccccaggatgggcccgacgttcggcgccatgatgatctccggccagaaggcggcgcacctggcgctcaaggcactgggcaggcccaacgccgtggacgggaccatccccgaggtgtcgccgccgttgcgcgaggagttgatgattgcgtacaaggacgacgaggtcgtggacgcctgagtgcggcaagcagagaggaggatcgacgccagcagcgtcttatcttaattgccttgttgttcaatgatgaatcgatcgaattgcttcatga

SEQ ID NO: 8650 - protein, 101 aa, Homo sapiens
ISAVPGMKALDMNTAEDEIVRLTREVVPGMIVTGMEVAEIDGAPRMGPTFGAMMISGQKAAHLALKALGRPNAVDGTIPEVSPPLREELMIAYKDDEVVDA

SEQ ID NO: 8651 - DNA, 410 bp, Homo sapiens
  misc_feature (409)..(409): Wherein n may be a, c, g or t
tccggagaatgtggacgagaaaactatgttttaaacctttttttattctacaggaaatgaatttgtttgccctttttcctgtggtgccattgtgtctgaattttctttctgttcttataataggcagaatgaataagaaagccacacattttccgattcctctggatgctgtgtggggctatgctgtgaggttgaataattatgattaattgtaagctggaccatgtgcatttcagagagtgggtagtaattaagtaagagttaatgattttaccattgggctactggtatgtatttatgatacatagctctattattcctacaagatatacttcgtaattgcacagatgttgttgaactccaatttcaagccataaaagtgttttggggctgctttctttttatatant

SEQ ID NO: 8652 - protein, 66 aa, Homo sapiens [sequence omitted]

SEQ ID NO: 8653 - DNA, 384 bp, Homo sapiens
agcttacctcctattctatcattcacctacacttgggggtttttatttttagtatatgctattgctttgaatcaaatctgcggcctaacaaggttagggagtaatacgaccgataacataaattttagaactgtaatcaaatccatgattgttctgtttagatgtagttttggtgagggctggaattatatcatggccgacctaactgtgtcagaaccttattgctcctctgatgaaaaattcacctatacggactgtggatcagagacatatgcctatttgttattaatgtcgtggaatattatttccatgtatatttttgtgaatatgtttgtttcgttgattattggtaatttcagttatgtttaccgtagcggtggatcc

SEQ ID NO: 8654 - protein, 128 aa, Homo sapiens
SLPPILSFTYTWGFLFLVYAIALNQICGLTRLGSNTTDNINFRTVIKSMIVLFRCSFGEGWNYIMADLTVSEPYCSSDEKFTYTDCGSETYAYLLLMSWNIISMYIFVNMFVSLIIGNFSYVYRSGGS

SEQ ID NO: 8655 - DNA, 216 bp, Homo sapiens
cggaaaggactaacagccgccacccgccaggaactgctagataaggtagtggagaccttgctgctaagcggagtgctaacgctggtcctggaggaggatgggactgcggtggagactgaagacttcttcgagctgctagaggatgacacatgcttgatggctctagagcagggacagagctggagcccaaagagtgggatgttgtcatacggccta

SEQ ID NO: 8656 - protein, 72 aa, Homo sapiens
RKGLTAATRQELLDKVVETLLLSGVLTLVLEEDGTAVETEDFFELLEDDTCLMALEQGQSWSPKSGMLSYGL

SEQ ID NO: 8657 - DNA, 249 bp, Homo sapiens
accggtctgattacgctaaaacagggtaaaggattgctgccgacttcgctggatattagcgccaacccgcataactacaagattatggaactggagggagcgcagttgccgcaggtgctggacgatcccaaagtcaccgtagccgtcatcagcactacctacatcaaccagaccggcctgacgccaaccaaagacggcatctttatcgaagacaagaactcgccgtacaccaatatcatcgtgacgcgt

SEQ ID NO: 8658 - protein, 83 aa, Homo sapiens
TGLITLKQGKGLLPTSLDISANPHNYKIMELEGAQLPQVLDDPKVTVAVISTTYINQTGLTPTKDGIFIEDKNSPYTNIIVTR

SEQ ID NO: 8659 - DNA, 451 bp, Homo sapiens
  misc_feature (451)..(451): Wherein n may be a, c, g or t
gaattctgatacatttatagactctgattatgtaacatggtttattattatccttctatttgggaaaaatatctttatgtgataaaataagttaaaagttaagttttccataattttcacattcataacttagaacagttaacaaatgaaaattccttttggtactagatacttagtttttttctctattctaatactaatatgcaaaatacttttatttctggtttataggttatccattttgttttgcaaaatactcttgtataaatttgttgcaaatacaaagagttcctggtccagaaatattagtatgcattcagtaatgtatcctgccacaataaaagtaaattggcttcataagagcctatctcatttctaaatatcactgtgtatttgataaataaaaacaaagatttgtcgggtgctttgttcatgttaagatgacctgacn

SEQ ID NO: 8660 - protein, 77 aa, Homo sapiens
MKIPFGTRYLVFFSILILICKILLFLVYRLSILFCKILLYKFVANTKSSWSRNISMHSVMYPATIKVNWLHKSLSHF

SEQ ID NO: 8661 - DNA, 213 bp, Homo sapiens
cttaagaatggaaagcgtcctgcttagttcagagtgattctcagagaaacgcatcagcatcaagttatcgacgatgctggacaggtcagagtttggcgcgctgacctcggagccaaatagatcacgcatttcccaggacgcgaatacggttacgcccctggatcgaagctcattcatcagcgcactgaagaagtcagtagttcgcgccgggtt

SEQ ID NO: 8662 - protein, 59 aa, Homo sapiens
MNELRSRGVTVFASWEMRDLFGSEVSAPNSDLSSIVDNLMLMRFSENHSELSRTLSILK

SEQ ID NO: 8663 - DNA, 401 bp, Homo sapiens
acgcgttcaggcggttaacaatcgcgctaagaagctgaccaaggaaaatgtcggcatggtacatctgagcaagagcttcatcggtgtttatctctactcagaaggcaagtttgtgaccagcaactatctcaatcgtggctacaaggacattctgagctatgcagacgatgctagtcttttgcaaaagcctccagcagtggcttcagatgatctggatacaggtctcttgaagagggccttggatgagtgggtggctgatgctaagaaccacattctcaatactgaaaacttctttagcgggtcaaccggtctcaacattgacagtttctacgtctttggtgaccaagacatctgctggcagttggcagctattctgaagcagagcatgaatcgggaattgt

SEQ ID NO: 8664 - protein, 115 aa, Homo sapiens
MVHLSKSFIGVYLYSEGKFVTSNYLNRGYKDILSYADDASLLQKPPAVASDDLDTGLLKRALDEWVADAKNHILNTENFFSGSTGLNIDSFYVFGDQDICWQLAAILKQSMNREL

SEQ ID NO: 8665 - DNA, 508 bp, Homo sapiens
  misc_feature (1)..(1): Wherein n may be a, c, g or t
  misc_feature (2)..(2): Wherein n may be a, c, g or t
nntcatgaaaggagaggccgtatgcccattgtcaaactcagtgcgcagttcgtgcgcgaagcggtttgcccgcccggaaaatccaaggtggactattacgacaacgcactcaaagggttcatcctggaggctcgaccttcaggtggcaaaaccttttacctgcgctatcacgacagccacggcaagctgcgccaatgcaagatcggtgatgctgctgcggtcagctacgacaaggcccggcagaaggccatgcggttgcgttggaaggtggaatgggggggcaatccattggaggagcgccaagccttgcgtgcggtaccgaccctggccgagttcatccgcgagacctatgtgccgcacatccacctgcaccggaggaattttcagtccacgctgagcttcctcaagtgccatgtcctgccgcgctttggagccaagcacctggacgaaatcacgaccaacatgctggccgaggctcaccaggatctgcgcacgaagggctacgcgt

SEQ ID NO: 8666 - protein, 169 aa, Homo sapiens
  misc_feature (1)..(1): Wherein Xaa may be any naturally occuring amino acid
XHERRGRMPIVKLSAQFVREAVCPPGKSKVDYYDNALKGFILEARPSGGKTFYLRYHDSHGKLRQCKIGDAAAVSYDKARQKAMRLRWKVEWGGNPLEERQALRAVPTLAEFIRETYVPHIHLHRRNFQSTLSFLKCHVLPRFGAKHLDEITTNMLAEAHQDLRTKGYA

SEQ ID NO: 8667 - DNA, 211 bp, Homo sapiens
tccggatgctttcagctgacacaatgatgatccactgttgctgcaaacactccaacccaaataagcctgttgccagcggaaaattctggggagctgttcttggccagagcagtgtccatgtttccacctccgcaggacaaagacagctttcacccgaaccgtgagcaggaaactcagaagaaaacctgttcgctctcaaaatcacactagt

SEQ ID NO: 8668 - protein, 52 aa, Homo sapiens
MLSADTMMIHCCCKHSNPNKPVASGKFWGAVLGQSSVHVSTSAGQRQLSPEP

SEQ ID NO: 8669 - DNA, 408 bp, Homo sapiens
tgtacagtcatgtgtttcttaacaacggggatatattctgagagatgcgttgctggacaattttgttgttatgtgaacgtacaaagtactcacccaaacctagatggtgcagcctgtgcctccggctacaaacctgcacacaggtgactctcctgaatcctgtgggtaattggaatatagtggtatttgtgcatgtaaacatatcttgacacaggaaaggtaatgtaaagatacggtattacagtcttacagggtcccattgcatatgcggtccattgttggcagaaacggcattatgtggtgctcaactgtattgaaacagacttttatttgacttctgtttaatgcctaaagatgtcttagggtaactcacagaaggccaaattaaccacccgaggtcgtctttac

SEQ ID NO: 8670 - protein, 64 aa, Homo sapiens
MFTCTNTTIFQLPTGFRRVTCVQVCSRRHRLHHLGLGEYFVRSHNNKIVQQRISQNISPLLRNT

SEQ ID NO: 8671 - DNA, 234 bp, Homo sapiens
  misc_feature (43)..(43): Wherein n may be a, c, g or t
atcctggaaaaaaaaatccaagacttgaaacaaacacctccgngtgcgaccctaagagaacgcatagctatgactttcccctacgattcccatgtcaagttcccagcatttatttggcaaacttggtccaatgatgaaggtcccgagcgtgttcaagatataaagggcatgtgggaaagcaagaatccgggctttgcgcacgaagtgttgaaccatgacgtgataaacgcacta

SEQ ID NO: 8672 - protein, 78 aa, Homo sapiens
  misc_feature (15)..(15): Wherein Xaa may be any naturally occuring amino acid
ILEKKIQDLKQTPPXATLRERIAMTFPYDSHVKFPAFIWQTWSNDEGPERVQDIKGMWESKNPGFAHEVLNHDVINAL

SEQ ID NO: 8673 - DNA, 377 bp, Homo sapiens
atggtaggaacactctacggtggggtgtggacagaacaggaagccagtgggcaggctggaggagcaggtggcttgtggaagggtgggttagggaccttcagcctgacttttcctggtggggtggacatagggtgggcaggcccaggaagcccatgacttcatccacgctgcctcccttctcccctccttacccagggtcccgcatccttcagccccctatgtggctgccctgcacccttgcctgtcccacctggatgccatgcacctgtccccgtgcactggttccctgcttggcactgccagctctcctgctctgcttaacatgctctgttgagctattgcccccagtcccctgccccattgcttgctgagacctt

SEQ ID NO: 8674 - protein, 72 aa, Homo sapiens; identical to SEQ ID NO: 5420

SEQ ID NO: 8675 - DNA, 294 bp, Homo sapiens
  misc_feature (1)..(1): Wherein n may be a, c, g or t
  misc_feature (2)..(2): Wherein n may be a, c, g or t
nngcgcgcctggccgagctggagctggagctgtcggaaggtgacatcacacaaaaaggatatgaaaagaagaggtcaaagttaattggagcctaccttccgcagcctccgacagcgaatggagctgccgtggttcggtgtagactgcagcacagtgaaggagcgccgaggagaacattccgctctgcccacatcggggtgtgcgacgtccgagaagctgcggctcgggagcgggtggccagcaccgcagggaaccggcctctgttttactttcgtttcggggtggaccaagctt

SEQ ID NO: 8676 - protein, 70 aa, Homo sapiens
LEPTFRSLRQRMELPWFGVDCSTVKERRGEHSALPTSGCATSEKLRLGSGWPAPQGTGLCFTFVSGWTKL

SEQ ID NO: 8677 - DNA, 276 bp, Homo sapiens
  misc_feature (1)..(1): Wherein n may be a, c, g or t
nagatctattgcaatgaactaaaaattgaagggaattgtgcatattcaactggctggttgcataaatttaagaaaagacagggtgttacatttttaaaaatctgtggcaataaagcatctgctgatcacaaagcagtggagaaatgtgttgatgaatttgccaatattttcactcatgaaaatctgacactagaccaagtctacaagattgctgaaacatcactgttttggtgttatttgccccagatagatactaactatggctgatgagctagc

SEQ ID NO: 8678 - protein, 88 aa, Homo sapiens
  misc_feature (1)..(1): Wherein Xaa may be any naturally occuring amino acid
XIYCNELKIEGNCAYSTGWLHKFKKRQGVTFLKICGNKASADHKAVEKCVDEFANIFTHENLTLDQVYKIAETSLFWCYLPQIDTNYG

SEQ ID NO: 8679 - DNA, 366 bp, Homo sapiens
  misc_feature (34)..(34): Wherein n may be a, c, g or t
gatagtttcgggttaaagggcccggataaacagnaacccgccggggtactctccggtggtgagcgcaaccgtctgaatttggccctaaccctcaagcagggcggaaacgtgttgcttctcgacgagccgaccaacgacctcgacgtcgaaaccctttcgagcctcgaggacgccctgctggagttccccggctgtgccgtggtggtctcccacgatcgctggttcctggaccgcattgccacccacattctggcttgggagggcgaggacgaggatggggtgccgcactggttctggttcgagggtaactttgccgactacgaggccaataagatcgagcgtcttggcccggaggccgcgcggccg

SEQ ID NO: 8680 - protein, 122 aa, Homo sapiens
  misc_feature (12)..(12): Wherein Xaa may be any naturally occuring amino acid
DSFGLKGPDKQXPAGVLSGGERNRLNLALTLKQGGNVLLLDEPTNDLDVETLSSLEDALLEFPGCAVVVSHDRWFLDRIATHILAWEGEDEDGVPHWFWFEGNFADYEANKIERLGPEAARP

SEQ ID NO: 8681 - DNA, 439 bp, Homo sapiens
tgtacaccctgaggtttggtgggttagagaaaccacagcagcctgtgagagctgctgccacacagtgaccatgggcaacaggcaggtgctattggaacaagcagggagtgcaggctcagggaaaaagaggagaggggactggctgcctgcagacaggtagctccacagggcaccgatagggtttgggacaggtgggatatgcaagcctaaataggtggtagatgattccaggtgccagggtctgtccttgggccttgagcttcaatcctaattcccatcgctgactccaaggttctgcttggctgctgcccactgccttcaattcatacataaggacccagctctccattccatgtgtctcctttgagaaagaaccagcctagaggctgaggtggggtggtgcacttccatcaggagttcattggtttgagtgggattg

SEQ ID NO: 8682 - protein, 77 aa, Homo sapiens [sequence omitted]

SEQ ID NO: 8683 - DNA, 494 bp, Homo sapiens
  misc_feature (1)..(1): Wherein n may be a, c, g or t
  misc_feature (2)..(2): Wherein n may be a, c, g or t
nnagatctacgtgcagatcgtcagcctgaatttacacaaatcgacgttgaaacatcgttcatgagtgacgatgacatcatggatttaatggaaggcttaacagttaaaatgttcaacgaattattgaatgtaaaattcgataaattcgaacgtatgacttatgccgacgcaatgcgtgattatgcttctgataaaccagatatgcgtattccattgaaactcggtgacgttgcagacttaatgcaagacgttgagttcaaagttttcgctggtcctgcaaaagatcctaaaggtcgtattgtagcgttacgtgttcctggtgcaggttcactaccacgtagtgcgattgtcgaatacactaaattcgtgggcatctacggtgttaaaggcttggcttatattaaagtcaatgaacttgagaaaggcatcgaaggtcttcaatcaccaatcgttaaattcatcgaaccaatggtacttgacctactcaaacgcgt

SEQ ID NO: 8684 - protein, 155 aa, Homo sapiens
EFTQIDVETSFMSDDDIMDLMEGLTVKMFNELLNVKFDKFERMTYADAMRDYASDKPDMRIPLKLGDVADLMQDVEFKVFAGPAKDPKGRIVALRVPGAGSLPRSAIVEYTKFVGIYGVKGLAYIKVNELEKGIEGLQSPIVKFIEPMVLDLLKR

SEQ ID NO: 8685 - DNA, 317 bp, Homo sapiens
ggcgccgactgtgtggtgctgtgtaccaaccccatgcatttggtggcgccgcgtatcgaggcggcggtatcgattccgttcctgcatattgccgatgcagcaggagcggcagcggtcgaagccggcaccttgaccgtcggcctgctgggcaccgcgttcaccatggagcaggactttttcaaggcccgcctggccgctcagggcttgcccgtactcgtgcccgacgcgcacgagcgcgaggccgtgcaccggatcatttatgaggagttgtgtgtcggggtgatcagcgaggcttcgcgccaggtttatcaacgcgt

SEQ ID NO: 8686 - protein, 105 aa, Homo sapiens
GADCVVLCTNPMHLVAPRIEAAVSIPFLHIADAAGAAAVEAGTLTVGLLGTAFTMEQDFFKARLAAQGLPVLVPDAHEREAVHRIIYEELCVGVISEASRQVYQR

SEQ ID NO: 8687 - DNA, 236 bp, Homo sapiens
  misc_feature (1)..(1): Wherein n may be a, c, g or t
  misc_feature (2)..(2): Wherein n may be a, c, g or t
nntgatcagcaccagcacagtggacgcggcggaaaacggcgaatccagttgcagggagcggtggtcggcaagggctggtggcgcgccgtgggtaccctggtcggcacgctcgcgcccttcgtcctgaccgcgctgttcgcccagaagatgctgctgttcgtcgtcgccctgggtttctggctgggtctctgcgtcggcgtcatgagcctggtccggcacttctaggccaccgccgc

SEQ ID NO: 8688 - protein, 74 aa, Homo sapiens
  misc_feature (1)..(1): Wherein Xaa may be any naturally occuring amino acid
XDQHQHSGRGGKRRIQLQGAVVGKGWWRAVGTLVGTLAPFVLTALFAQKMLLFVVALGFWLGLCVGVMSLVRHF

SEQ ID NO: 8689 - DNA, 387 bp, Homo sapiens
ctcgagcagcctaggatgggaccagcccagcctgtagccagatgtaaccagcttgctgtcttgtcccaagcctccctctaaggggacagtgtgaatcggtgaatgttgagtggaactggggttaggggttggcaagggaatgctctgaaatcagtgtgggcatggctgtaccaacaggaatgaacagttgttcgatgacagatgactcccaagtgacacacacgtgtcctcaagaagactcacaccatcctgactcatggccaccaagcagatggcagatgaaactccctgactgtggtcagcgactgggctggctaaactcgggcctcccctaagtcacagcacagaaggccctctgctgttcgggtgacagtcctgtggggatcc

SEQ ID NO: 8690 - protein, 57 aa, Homo sapiens
MAVPTGMNSCSMTDDSQVTHTCPQEDSHHPDSWPPSRWQMKLPDCGQRLGWLNSGLP

SEQ ID NO: 8691 - DNA, 231 bp, Homo sapiens
cggattagtgacagtttcaaatatatttctaaatcgtcactaggacggcccacttcgttgatcaacaatctacagaagagaaaagtcatggccgatgtagtcattgtagatgaagcacatttgttggccacttctaaggatgctttcaaaagattttatggcgaaaaccatctcaaagacttaatgtccctttgtaaagtgcttgtattggtttacgatgataagcaagct

SEQ ID NO: 8692 - protein, 77 aa, Homo sapiens
RISDSFKYISKSSLGRPTSLINNLQKRKVMADVVIVDEAHLLATSKDAFKRFYGENHLKDLMSLCKVLVLVYDDKQA

SEQ ID NO: 8693 - DNA, 421 bp, Homo sapiens
  misc_feature (1)..(1): Wherein n may be a, c, g or t
  misc_feature (2)..(2): Wherein n may be a, c, g or t
nnaccggtgttggtatatctggtagcagcagccgttatggggctatcagctatcagctaccgcgaaatggcattgcgctttccggtagcgggatcggtttacgggtacacccgtttctctttgggacgtaccccaggattcatagccggatggctcatcctgctcgactacatccttatgcccgcactgctcacggtgctctcggcggtcgcactggcccacatttggcccagcgtccccatggggattttctcccttgtctttgtgttcgcttctatggcactcaatttgcagggcatgactgtcacgacacgggtgggcatcgtgctgttgaccatccagctcgcaacgatcgccttcttcctggtgcgcgtcggacttgggttggctggcggaggcgttgtctggagctggcacgcgt

SEQ ID NO: 8694 - protein, 140 aa, Homo sapiens
  misc_feature (1)..(1): Wherein Xaa may be any naturally occuring amino acid
XPVLVYLVAAAVMGLSAISYREMALRFPVAGSVYGYTRFSLGRTPGFIAGWLILLDYILMPALLTVLSAVALAHIWPSVPMGIFSLVFVFASMALNLQGMTVTTRVGIVLLTIQLATIAFFLVRVGLGLAGGGVVWSWHA

SEQ ID NO: 8695 - DNA, 297 bp, Homo sapiens
aacatctgctcgcatcgaggcgctacgctgtgccgcaatgccaagggcagtgcgagcaacttcgtctgcagcttccacggctgggcgtttgacgcgaagggtaacttgctggcgccaatgaatgaggacggtgccgggtatccgcaaggcttcgacaagagcaagcacggcctgaccaaggtgcggctcgaaagctaccgcggcttcctcttcgccacgctcaaccgcgacgccgagccgctgatcgactatctcgccgacagcaagaccttcatcgacatcgtggtcgagcagtcg

SEQ ID NO: 8696 - protein, 99 aa, Homo sapiens
NICSHRGATLCRNAKGSASNFVCSFHGWAFDAKGNLLAPMNEDGAGYPQGFDKSKHGLTKVRLESYRGFLFATLNRDAEPLIDYLADSKTFIDIVVEQS

SEQ ID NO: 8697 - DNA, 266 bp, Homo sapiens
  misc_feature (1)..(1): Wherein n may be a, c, g or t
  misc_feature (237)..(237): Wherein n may be a, c, g or t
nctattacccagtgtggtcacggcaaagcgggagcccaggacttgccccaaagggctgttacttccctaggtctgggggaggcaacaatgatcagagcccaaaaggtgagagtccacaggcgcctggagaggctactggagaagccctgttaccccttatctatggaagcagctccccgaggaagccctgcaggaggaaaccaggggagcaaacacgcgaccactctcccctccctnacggagatcgtcggagagaggctaagccg

SEQ ID NO: 8698 - protein, 59 aa, Homo sapiens [sequence omitted]

SEQ ID NO: 8699 - DNA, 299 bp, Homo sapiens
agatctgtcacgattacacccgtcccatcccgaatccagaactgggtactgcgtggtcggcttggcgaaaccgtcctcccatggtctggcgccaagaaggatcaatcccggtactagcggcctcccccgcatcacatggcggcccagaaccttgggcccggctactcactggagcattggctgcatacctgacccacgaaagactcaccggggaagatatccggccaagcaataaggtcattggcgcagccgggcgccccagaagaagtcacagttccactgacagggtctcgacgcgt

SEQ ID NO: 8700 - protein, 75 aa, Homo sapiens
MTLLLGRISSPVSLSWVRYAANAPVSSRAQGSGPPCDAGEAASTGIDPSWRQTMGGRFRQADHAVPSSGFGMGRV

SEQ ID NO: 8701 - DNA, 362 bp, Homo sapiens
  misc_feature (1)..(1): Wherein n may be a, c, g or t
  misc_feature (362)..(362): Wherein n may be a, c, g or t
nggaggtgaatgttacacaaaagaatttggtcctaatattacggtgagcaggcacccacaaagaggattctgtttttgttctgtttgccgttaaagaagataatggcacggtctttttacaagttgatgagctcagtgtcaccgggcataccaagtacatgcaataggaaacataaacagacaatctggaaatattattaaattcatgcttttaagagctagaagaggccttcaaggtccactagcgtatccacttgccagacggagaaatgaaggcctcaaattgcaaagcatcttgaccaagtcacagagcaaactcgtggcacagctgtcatcagaacacagatgtctttgcttccacn

SEQ ID NO: 8702 - protein, 53 aa, Homo sapiens
MYLVCPVTLSSSTCKKTVPLSSLTANRTKTESSLWVPAHRNIRTKFFCVTFTS

SEQ ID NO: 8703 - DNA, 282 bp, Homo sapiens
gtcgacgatgatctctccttcgagctgctccgcacggaggacatccgcgagacagacgaatacccgggcattcgagtattcctgcacgctcgctacggtacgctgtcggttccgcttacagttgacgtaaccacaggcgacaggataatccccgacgccatcgcctacgagtacccgttcgtgttcgacgaggggtcagcaagaatcatggcctaccctctggaaaccgttttggccgaaaaactcgaaaccatccttgtcagaaacgtaaccaccacgcgt

SEQ ID NO: 8704 - protein, 94 aa, Homo sapiens
VDDDLSFELLRTEDIRETDEYPGIRVFLHARYGTLSVPLTVDVTTGDRIIPDAIAYEYPFVFDEGSARIMAYPLETVLAEKLETILVRNVTTTR

SEQ ID NO: 8705 - DNA, 668 bp, Homo sapiens
  misc_feature (1)..(1): Wherein n may be a, c, g or t
ntcgcgaacggacgccctctcaaggccctcaacccacgcaaccaccggatcgggcttaaccatggggcgctcgctgcccgattcaccaaagagggcgagccgctcattggggccgacggggacgtcgagttgtgggtagaggccgccggcaaccccgacatggcccagcacttgggaggacccaccgagctgggagatcgtcgcactgcgggtcaggagccgctgtggcagttcaagggagcggaactttcggtgcgccgcaatgaggtgtggggcttgtggcttgacatcgacgttcttgacgggctcatgcgccagctaccagccgagtctacccatcgcgccagacttctccgcggcttggaacaagctgctgacgaggtcgatcaccaggggatcgtcgccggtgccggaccggcccggcaaatccttgccgggtacctggattcgggggcaaactcatcagcccaacagatgacggccatcggacatgcgcacatcgactcggcctggctatggccgttgcgtgagacccgccgcaaggtggtgcgcaccttctccaacgtcgtcgccctggcgcaggagtaccccgacttccacttcgcttgcaccagtgcccagcactatgcctggctccaagaatcctcaccagagctcttcgaacgcgt

SEQ ID NO: 8706 - protein, 222 aa, Homo sapiens
  misc_feature (1)..(1): Wherein Xaa may be any naturally occuring amino acid
XANGRPLKALNPRNHRIGLNHGALAARFTKEGEPLIGADGDVELWVEAAGNPDMAQHLGGPTELGDRRTAGQEPLWQFKGAELSVRRNEVWGLWLDIDVLDGLMRQLPAESTHRARLLRGLEQAADEVDHQGIVAGAGPARQILAGYLDSGANSSAQQMTAIGHAHIDSAWLWPLRETRRKVVRTFSNVVALAQEYPDFHFACTSAQHYAWLQESSPELFER

SEQ ID NO: 8707 - DNA, 376 bp, Homo sapiens
  misc_feature (1)..(1): Wherein n may be a, c, g or t
  misc_feature (2)..(2): Wherein n may be a, c, g or t
  misc_feature (363)..(363): Wherein n may be a, c, g or t
  misc_feature (364)..(364): Wherein n may be a, c, g or t
  misc_feature (365)..(365): Wherein n may be a, c, g or t
  misc_feature (366)..(366): Wherein n may be a, c, g or t
  misc_feature (367)..(367): Wherein n may be a, c, g or t
  misc_feature (368)..(368): Wherein n may be a, c, g or t
  misc_feature (370)..(370): Wherein n may be a, c, g or t
  misc_feature (372)..(372): Wherein n may be a, c, g or t
  misc_feature (373)..(373): Wherein n may be a, c, g or t
  misc_feature (374)..(374): Wherein n may be a, c, g or t
  misc_feature (376)..(376): Wherein n may be a, c, g or t
nnaagcttttgaccttatattcgtcatccgttataagtgattagactgaaggggcgcgaactaaactaattagattataatacgttttatagggatatcactacaaactgcggcctaagaggatgatcttcatggcggaaacttgcaggtttcctggattatggccctcgggttagattggggatatattacagttacactatgacggtggcttattccctagagaatctcaaaaagattagtaattccctggtgggagaccagttggctaaggtagattactttttggctccaaagtgccagatttttcaatgtttgttgtccattgagcaaagtgacggtgtagagttaaaaaatgcgaannnnnncncnnncn

SEQ ID NO: 8708 - protein, 58 aa, Homo sapiens
  misc_feature (54)..(54): Wherein Xaa may be any naturally occuring amino acid
  misc_feature (55)..(55): Wherein Xaa may be any naturally occuring amino acid
  misc_feature (56)..(56): Wherein Xaa may be any naturally occuring amino acid
  misc_feature (57)..(57): Wherein Xaa may be any naturally occuring amino acid
  misc_feature (58)..(58): Wherein Xaa may be any naturally occuring amino acid
MTVAYSLENLKKISNSLVGDQLAKVDYFLAPKCQIFQCLLSIEQSDGVELKNAXXXXX

SEQ ID NO: 8709 - DNA, 150 bp, Homo sapiens
atcaaggacttaggagctacctgggtggtgctgggacactctgaaagaagacacatctttggggaatcagacgagttgattgggcagaaagtgaaccatgccctatcccaaggactcggagtgatcgcccccatgggggaaaagttagac

SEQ ID NO: 8710 - protein, 50 aa, Homo sapiens
IKDLGATWVVLGHSERRHIFGESDELIGQKVNHALSQGLGVIAPMGEKLD

SEQ ID NO: 8711 - DNA, 207 bp, Homo sapiens
ttcgccgttcttcgctccgggggctccatccgccctctctccccagaggaagccgtagctgagagcgactgcaaggtttccagaatatacggcgtggtcggcaccataagattgctcgctggaagctatgtactcgttatcacttctcagaaagatgctggctcttatctgggctcccctgtgtaccaagtgaactcaatgaaattt

SEQ ID NO: 8712 - protein, 69 aa, Homo sapiens
FAVLRSGGSIRPLSPEEAVAESDCKVSRIYGVVGTIRLLAGSYVLVITSQKDAGSYLGSPVYQVNSMKF

SEQ ID NO: 8713 - DNA, 336 bp, Homo sapiens
tccggacgatggtgctcgccggatcgtccgacgagtcggacgagcaaccaccgaggacgagcatcgtggcggtgatccccaggatcgagacacgacgaacggacgtgcgggcggtcgtgcgtgagagaacagacgtgcgtgagagaacagacaagtcgacggcttcctgtgtgagcgggcgccgttcaggttagctgttcgactcagctgttctgcttgtccacctcgagcgtgtccgagaggtcgtcgaggatcatgtgggcgccctggatgctgaccggcgacatccaccgggaatcgtgcacgtcgaccttgcgtcctcgaagcgtctgccac

SEQ ID NO: 8714 - protein, 61 aa, Homo sapiens
MVLAGSSDESDEQPPRTSIVAVIPRIETRRTDVRAVVRERTDVRERTDKSTASCVSGRRSG

SEQ ID NO: 8715 - DNA, 341 bp, Homo sapiens
  misc_feature (1)..(1): Wherein n may be a, c, g or t
  misc_feature (2)..(2): Wherein n may be a, c, g or t
nntgatcaacataacggattaatatttatcgtaatttcagtcatattgggacttatttttgttatcttatttataaagattagtaagataaaaagtctctaagatttcttttttttttttttttttttggaaaaaaattctcactctgtcccccaggtgggagtgaaggggaaaaatcttgggcttttggaaaccccccccccccgggttccaagcagattttctctcgtctcctctcaccctctcccaagttagttggggtttacggggcccgttgccaccccccccacccattttttgtttttttaattaaaaagggggttttcaccggttttacccag

SEQ ID NO: 8716 - protein, 50 aa, Homo sapiens
DFFFFFFFLEKNSHSVPQVGVKGKNLGLLETPPPRVPSRFSLVSSHPLPS

SEQ ID NO: 8717 - DNA, 261 bp, Homo sapiens
  misc_feature (1)..(1): Wherein n may be a, c, g or t
  misc_feature (2)..(2): Wherein n may be a, c, g or t
  misc_feature (3)..(3): Wherein n may be a, c, g or t
  misc_feature (4)..(4): Wherein n may be a, c, g or t
nnnngggcaaaagctgtacttccaagcgatattcgtcatgactcccctcgcatggtggcttatgtggaatcagataatgagcaagctcgccaagacgctcttgatgctctggaggaggaaaccgaacttgccgcgtccagatcagcaatttatcaacaagacctacgtcgctatcacagccggaaagttcaaagccgtactttttaggaaggtgacttagtgctccgtctgatacaagatcaggcaggcatgcataagctt

SEQ ID NO: 8718 - protein, 68 aa, Homo sapiens
  misc_feature (1)..(1): Wherein Xaa may be any naturally occuring amino acid
  misc_feature (2)..(2): Wherein Xaa may be any naturally occuring amino acid
XXAKAVLPSDIRHDSPRMVAYVESDNEQARQDALDALEEETELAASRSAIYQQDLRRYHSRKVQSRTF

SEQ ID NO: 8719 - DNA, 208 bp, Homo sapiens
tccggaggcagtgatggcgtgctggccgcagtgggtgcatggactttgcagatgtggagtctgcacctcctcctacatttgctgagcacctacttcatccaatacaccaccaaggagaagacggacaagacccctgttctggagggggaagaataaaaataatgcctctcaccgggggccgggccaagctctgggcacctcttcatga

SEQ ID NO: 8720 - protein, 56 aa, Homo sapiens
MDFADVESAPPPTFAEHLLHPIHHQGEDGQDPCSGGGRIKIMPLTGGRAKLWAPLH

SEQ ID NO: 8721 - DNA, 410 bp, Homo sapiens
  misc_feature (1)..(1): Wherein n may be a, c, g or t
  misc_feature (2)..(2): Wherein n may be a, c, g or t
nnaccagactgctgaccgtgtcgacaaccccgaggaacagccccagtgagcttcgttgcgccgcccccgtaccgcgtatttcttgtcgacgatcatgcagtgttccgctccggggtgagggcggaactctcgcgcgaggcagacatggacgtagtcggtcaatccggtggcgtcactgaggcgatcgcgggtatcaactcgacgaaaccgcatgtcgttctgctcgatgtccacatgcctgacggtggtggagtggcagttctgcgcgccatcgattccggcccggtgtgcttggcgctcagcgtttccgatgcggccgaggatgtgatcgcggtgattgccggcggcgcgcgcgggtacgtgaccaagacgatctcgggatccgaactggccgagggtgtacgacgcgt

SEQ ID NO: 8722 - protein, 131 aa, Homo sapiens
PCRQPRGTAPVSFVAPPPYRVFLVDDHAVFRSGVRAELSREADMDVVGQSGGVTEAIAGINSTKPHVVLLDVHMPDGGGVAVLRAIDSGPVCLALSVSDAAEDVIAVIAGGARGYVTKTISGSELAEGVRR

SEQ ID NO: 8723 - DNA, 346 bp, Homo sapiens
tgatcactaagaaaagttgaatctctgcactcagttccagtaaatataattaacgtgaaaatgtggtcaacattgcctcgttatgtatatggagcatatataatatctgttagatatgtcatatgaacaaatattacatatatggatcataagtgtaaaactggtaaatcacttaatcattgagctttcatgccttatgtgtaattggtatgtctattcatacacagtttctttttcaagcctcacaacttgtcaccccttctggttccctatcttttgccagctgcaagaatcacttgacctcagcgtacaaccctgataggaccaactctgacctccgggtcgg

SEQ ID NO: 8724 - protein, 67 aa, Homo sapiens [sequence omitted]

SEQ ID NO: 8725 - DNA, 390 bp, Homo sapiens
tcacagaatggcagttatctaaagagctcatgaagtacccccacccatcccatcctgaagattccacccattcttccctttgcccaataaccagagtgttctggcaattagctagttcaaagccctctccagctacacacacatatctataatttccacagccagctttgatggatatccatgcagccacatgttcccccattcatgctttttctttctcttaaatatttataaaggttcacaagcagaaataaaagcccctcagattcagagccaactaaaaatagcatttctgtcccgtgccaggcaatctggcatcaatcaggccatcagaaagatgcgagagaggagagaagagaagctgataaccttttatccagttttttggtc

SEQ ID NO: 8726 - protein, 67 aa, Homo sapiens
MGEHVAAWISIKAGCGNYRYVCVAGEGFELANCQNTLVIGQREEWVESSGWDGWGYFMSSLDNCHSV

SEQ ID NO: 8727 - DNA, 238 bp, Homo sapiens
  misc_feature (238)..(238): Wherein n may be a, c, g or t
tgatcactggaacttagatgttgccccagaaatatattgctgccctgcaaatatttcccattctgaggaagacttaagttggcactgtaacttaattttgaccttttagttgtttctgggaagggaatgctccacacaagcacctgggctttgtggaacatccagccaaggatttgggctttcctgtgggttgtgacccttgcagtgctatggtgctgatcagtctcttcaacttggn

SEQ ID NO: 8728 - protein, 53 aa, Homo sapiens
MFHKAQVLVWSIPFPETTKRSKLSYSANLSLPQNGKYLQGSNIFLGQHLSSSD

SEQ ID NO: 8729 - DNA, 360 bp, Homo sapiens
  misc_feature (343)..(343): Wherein n may be a, c, g or t
atcctcaacaggttgcacgaccggaacgagacattgtactacagggtgctaattgacaatatcaaggattttgccccggtaatatacactcccactgttggcttggtctgtgaaaattacagcgggcttgtcagacaaccccgaggaatgtatttcagggcaaaggataagggggagatgatgtcaatgatttacaactggccagcagagaaggttgacatgatagttgtgactgatgggagtcgcattctaggcttaggtgaccttggtgttcagggcataggcatacctattggtaaactggacgtttatgttgcagctgctggtattaacccacagaagnttcttccaataagcttg

SEQ ID NO: 8730 - protein, 120 aa, Homo sapiens
  misc_feature (115)..(115): Wherein Xaa may be any naturally occuring amino acid
ILNRLHDRNETLYYRVLIDNIKDFAPVIYTPTVGLVCENYSGLVRQPRGMYFRAKDKGEMMSMIYNWPAEKVDMIVVTDGSRILGLGDLGVQGIGIPIGKLDVYVAAAGINPQKXLPISL

SEQ ID NO: 8731 - DNA, 289 bp, Homo sapiens
agatctggtgccgatcctatttcttaaaaaacaaaaaaaaacaaaaaaaccctatagtctgaatctgtttttttctctttgaaatgcaggaaacataatttcaaaaggttgtatacctgcaaacctactggccaaccagtaacattaacgtttaacttttctatttccttctggctcttatttgagggaaagataaacattgtcctgcttcttttcccttagctgtaagcaataaaactcccctaaaaataataaaagtgctttgtattttctttttggggataaaaat

SEQ ID NO: 8732 - protein, 58 aa, Homo sapiens [sequence omitted]

SEQ ID NO: 8733 - DNA, 306 bp, Homo sapiens
gcgacgatctcgaatgacaacctgcaggacctcaagactggtcagttggttggttcgacgccgtggaaacagcaggttgcgctgatcatcggagttatttttggttcggcgatcatcccgcccgtcatgcagctcatgcagagcgcctttggtttccagggtgcccccggtgctggtccgaacgctttgcaagccccacaagctacccttatttcctcgctggcgactggcgttttcggcgggtctcttgactggggactcatggggattggtgccctggtgggtatcggcgtcatcgtcgtcgac

SEQ ID NO: 8734 - protein, 102 aa, Homo sapiens
ATISNDNLQDLKTGQLVGSTPWKQQVALIIGVIFGSAIIPPVMQLMQSAFGFQGAPGAGPNALQAPQATLISSLATGVFGGSLDWGLMGIGALVGIGVIVVD

SEQ ID NO: 8735 - DNA, 430 bp, Homo sapiens
tcgaatatccatgcagcagctcgtggcagacgacaccgagaagctcagtacgggcagagtagctagctttctgtgatgcgacatggttgaggtaagatagcggtaagtgtatttccttgtgatcgttgtcgatgtctgcgccagtggtgtaggccacgccgtccatgtcgcgtaggatcaatgtgacggagcgtgtgccaggaattcttgtgtgggtcggtacgggtagtcttgttgatgcgtcatcatggttgggacgggtgtagagctgcttctcgacagtctcgactagattggcaaagtctttggcgctgttgaagttcttgagaaagaggtcggtggatttgtgggaaagatcgcggagttcgaggcgtagtttgactctgggaaagctggagcttgtggttggcgtcggctcggcttcacgcgt

SEQ ID NO: 8736 - protein, 55 aa, Homo sapiens
MDGVAYTTGADIDNDHKEIHLPLSYLNHVASQKASYSARTELLGVVCHELLHGYS

SEQ ID NO: 8737 - DNA, 208 bp, Homo sapiens
gtgcacagggaaagagatgctgctgcttcccgacgagagacacggtccagcattgctttaacccttgcactcatttttagacttgttattgtccaaaaatccaccaggaacgacacagaagcacgcagatcaccggcctttgctgtagccggggaagaaagggtcaaggacggtttggagggtctcatttagagtcatgatgtaatta

SEQ ID NO: 8738 - protein, 62 aa, Homo sapiens
MRPSKPSLTLSSPATAKAGDLRASVSFLVDFWTITSLKMSARVKAMLDRVSRREAAASLSLC

SEQ ID NO: 8739 - DNA, 367 bp, Homo sapiens
cttaaggaaaattcctatacctctctggactccagagggtagaactagattcagtcctctgagttcaatggcacttggattctatattacttagtaaatattttataacattaaatgaaagcaagataccgcccagatcagtcctgggtcttcttttctttcaggtgaggtttgtgatggtgaagcatgagagcagcatggaacctgccagtccaggctcctttctggatggaacactggctttccactgtggcatcacatccctcaaaaagagaatgaaacccacttgcccattcttacctccaactctcacattagcaagcaagattccctttctgctctcactctgacttcttccctggcgcgc

SEQ ID NO: 8740 - protein, 57 aa, Homo sapiens
MVKHESSMEPASPGSFLDGTLAFHCGITSLKKRMKPTCPFLPPTLTLASKIPFLLSL

SEQ ID NO: 8741 - DNA, 230 bp, Homo sapiens
gtcgacggcccccgccagggcggctctggtcgcggcggcgtcggacagatcggcggcgataccgtccgccgcgcgacgcgacagcgaccgcgcggcccagtcgtcggtcttcgcgatctgctcgatcagcgccttgccgatgatgccgctcgcaccggcgacgagtgcgaccttcatcggcgtaccccgccgacgccgagggccaggctgtagagcacgatcggcgcccc

SEQ ID NO: 8742 - protein, 59 aa, Homo sapiens
MKVALVAGASGIIGKALIEQIAKTDDWAARSLSRRAADGIAADLSDAAATRAALAGAVD

SEQ ID NO: 8743 - DNA, 222 bp, Homo sapiens
tgatcagaatttctcagttcaggagggactgacttcctctaggtgaaccacggcgctcgtcatcttcgttgttgcccttggggcttgggctccgatcgtccctcgggctcgggctgcgcccattggccacagggctacggtagccatcagatgggctccgactcctcttgctgttctctccaccaccagggttgccttcatggtctgagccattgcgtgcac

SEQ ID NO: 8744 - protein, 64 aa, Homo sapiens
MAQTMKATLVVERTARGVGAHLMATVALWPMGAARARGTIGAQAPRATTKMTSAVVHLEEVSPS

SEQ ID NO: 8745 - DNA, 213 bp, Homo sapiens
  misc_feature (1)..(1): Wherein n may be a, c, g or t
ntccacagtatttccctcttgattatggcaactccatctcaacactgctcaggccagaatccttggaaccctaatgctatatccaatctggttggcttttcctttatcagtgagcacttcagaccaattgtgctgctaccaccaggtcagagccactatcattttttgcctggattagggccagagtctccttactgggcttgcccttcctct

SEQ ID NO: 8746 - protein, 63 aa, Homo sapiens [sequence omitted]

SEQ ID NO: 8747 - DNA, 303 bp, Homo sapiens
  misc_feature (1)..(1): Wherein n may be a, c, g or t
ntctagagactggggttcaagtcccagcacccacatggtggctcacaactatctgtagctacagttccaaggaatctgacactctcacacagacatatatgtaggcaaaacaccaatgcacacaaaataaagatagtttgttttttgtttttttttaagcatgagtcattcaatttatagaagagtttacttgggcttctggttgttgaggtataagagtccatcccaccagggaatcttggcagcagctgtcagatatggcggcaggaacatttgaagactcacatctcgagcagcaagctt

SEQ ID NO: 8748 - protein, 57 aa, Homo sapiens
RLGFKSQHPHGGSQLSVATVPRNLTLSHRHICRQNTNAHKIKIVCFLFFFKHESFNL

SEQ ID NO: 8749 - DNA, 362 bp, Homo sapiens
  misc_feature (291)..(291): Wherein n may be a, c, g or t
  misc_feature (362)..(362): Wherein n may be a, c, g or t
gtgcacaggcatcagaatgagaacctggtctgagtcccagctctgccactactagccatgacacttcagacaagtcagttaatctcagtgaacacctgtttctttacctataaaagaggacaacattgcctacccaacagggctattgtgaagacaagacaggtcaagcccttagtacattgcttggcacataggctaatggggttagttggggtgctattaatactgcctgcagagttatttttctaaaaacctgattatggaacttctctgcttgagccacttcaaatntctgttttctcaaaacaaacttcaaactgtgtggtactttgtaagaggccctttgcagcgtaggtcgctan

SEQ ID NO: 8750 - protein, 63 aa, Homo sapiens [sequence omitted]

SEQ ID NO: 8751 - DNA, 276 bp, Homo sapiens
acgcgtgaagggtcaagttttaaagtttccagtacagtgtggactcacggtcctgctgcatgtgactagaacacatctcatgccacatgtgactcactacatgtgtttgacaacgcctgaactgatgtatgtgctgttcaacaagatgtgcccttcaatcatgcaactgagcgtcacagtcttgttaaattgctataagagtttccaaacacttgctttcaatttctctgctcattctattacagaccagtaataaggcattgcaaaggggcaggg

SEQ ID NO: 8752 - protein, 57 aa, Homo sapiens
MPHVTHYMCLTTPELMYVLFNKMCPSIMQLSVTVLLNCYKSFQTLAFNFSAHSITDQ

SEQ ID NO: 8753 - DNA, 366 bp, Homo sapiens
ccggcgaagaaggacatggccatggtcttcggcgcgactcattacgtcgacccgacggccggcgatccggttgagcagatcagagcgctgaccaggggccgcggcgtcgatttcgcgatcgaggtcgtcggcatcgtcgaggtcatggagcaggcctactgggcggcgcgacgcggcggcacgatcgtctacgtcggggcgctgggcatcgacgccaagctggtcctgccggcgaacgacctgcacggcggcgccaagacgatcatcggctgcgccaacggattgggcgcagtgcgcaccgactatgccaagatgatctcgctggtcgagaccggacggctggacctgggcgggatgatcacgcgt

SEQ ID NO: 8754 - protein, 122 aa, Homo sapiens
PAKKDMAMVFGATHYVDPTAGDPVEQIRALTRGRGVDFAIEVVGIVEVMEQAYWAARRGGTIVYVGALGIDAKLVLPANDLHGGAKTIIGCANGLGAVRTDYAKMISLVETGRLDLGGMITR

SEQ ID NO: 8755 - DNA, 385 bp, Homo sapiens
aaatttaaaaagagagataacagtatcaagtgcattgattgcttgtgaagattaaatgagttaatagcagtaaagaacagcctgccaagcactcattttcctgtggaaaacagggcttgctttttttttttctttgcagggtgtgcggggggagggtggacaactacccccattctcccacttggggaatctgacagccaaagggtccccacccagggtcaagaggtgagcctgtgacccgacccagccaataagggtcctctctagaacattagcatctggagacggcaactgcatatgcagaaaacagacctgattcacctggccataggtggctggaagggattagtttttaatcactagttcctggttcctggatccgcgg

SEQ ID NO: 8756 - protein, 78 aa, Homo sapiens [sequence omitted]

SEQ ID NO: 8757 - DNA, 438 bp, Homo sapiens
acgcgttgcgagcgtgccgacaatgtgaagaaacgcaattacttcaccaaatatggcgaaaccgctcaacaagtgttgaatcaattattggataaatacgccgacgtcggcgtacaagaaatcgaaagcatcaatgtgctcaaggtcacgccatttgaccaatacggccgtcctgcggaaattgttaaaaaaggctttggtggcaaaccgcaatacgacgcggccatcaaggagctggagtttgaaatataccagccggatacgcctaaaacagcctagccacaagcggctgggcttagctccagccacctcgacggcgaacactcttcattaaaaacgtgaactaaagcgttattagtagtaaataatcagagaaaaattatgtctatcagttctgcaatcaaatccatccaagatattatgcgcaaagacgccggc

SEQ ID NO: 8758 - protein, 92 aa, Homo sapiens
TRCERADNVKKRNYFTKYGETAQQVLNQLLDKYADVGVQEIESINVLKVTPFDQYGRPAEIVKKGFGGKPQYDAAIKELEFEIYQPDTPKTA

SEQ ID NO: 8759 - DNA, 219 bp, Homo sapiens
  misc_feature (1)..(1): Wherein n may be a, c, g or t
  misc_feature (2)..(2): Wherein n may be a, c, g or t
nnacgcgtcaccatcgtggaggaaaaatactggggaggcgtgtgcctcaacgtggggtgtattccctccaaagcgcttctcaaaaatgcggaagtcgccaacatcatgctgcaccacgccaccgaattcgggatagtggccgataacatcagcatggattttggggtagcccatgcccgcagccgaaaagtgtccgccaacattgtgaagggcgtgcac

SEQ ID NO: 8760 - protein, 73 aa, Homo sapiens
  misc_feature (1)..(1): Wherein Xaa may be any naturally occuring amino acid
XRVTIVEEKYWGGVCLNVGCIPSKALLKNAEVANIMLHHATEFGIVADNISMDFGVAHARSRKVSANIVKGVH

SEQ ID NO: 8761 - DNA, 387 bp, Homo sapiens
tcgggcaaattgcgcttggaacccgcagactttgtcccgcaaaaacacgaccatcttgcgcttttccaaaaacagcggacgcttgttttttccgacccgcgaatgtttggacgcatccgctttcatgttggaaaggcagctccgaattggtgggccgggctgcccccggcggtgacctcgagcgaattcacaacgtcatggctgcggcgcatcttcgcccgccgccgacgcacttcgctgaaggcgctgctattgacgcaggagttttttcccggcatcggaaattggatggccgacgaaatcctctggcaggcacgcttgcatccgcggctcgaggcggctgcgctccatgatgccgccgcccatgagttgtggcgtgtgacgcgt

SEQ ID NO: 8762 - protein, 129 aa, Homo sapiens
SGKLRLEPADFVPQKHDHLALFQKQRTLVFSDPRMFGRIRFHVGKAAPNWWAGLPPAVTSSEFTTSWLRRIFARRRRTSLKALLLTQEFFPGIGNWMADEILWQARLHPRLEAAALHDAAAHELWRVTR

SEQ ID NO: 8763 - DNA, 369 bp, Homo sapiens
aattcgccaggcggaaacagcgttggtcaggagtcggagctagagcatgtccctgaggaggatgactctggtgacaaggaagcagatcatgaggattctgagacagccactgcgaagaagaggaaagcccaaccattgaagaatccgaagaaatcattgaagaggggcagagtcccggcgcctttgaatttatcggatagcaacactaatacacacggtggtaatattaaggacggcaacttggcttcgtctaactctgcacattttcctcctgttgctaatcaaaacgtgaaaagcgcgcccgcacaagttactcagcattccaagttccagccccgtgtccaatacttgggaaaggccagttctaga

SEQ ID NO: 8764 - protein, 123 aa, Homo sapiens
NSPGGNSVGQESELEHVPEEDDSGDKEADHEDSETATAKKRKAQPLKNPKKSLKRGRVPAPLNLSDSNTNTHGGNIKDGNLASSNSAHFPPVANQNVKSAPAQVTQHSKFQPRVQYLGKASSR

SEQ ID NO: 8765 - DNA, 385 bp, Homo sapiens
gcgtatttcatcactcttccattcttcaggtggtcgatttttcttatctggctgagtatcatcgtggagctgttaagcgagccattcttcatcgtcaaccagtttatgttgaactatgccgcaaggtcaagatttgaaagcatcgcggtgactacaggatgtattgtcaattttatagttgtttatgccgttcagcaatcccgctacccaatgggggttgtcacatcggacattgacaaagaaggcatcgccatattggcatttgccttgggaaagttagcacattcgatcaccctgctagcatgttactactgggactatctcaagaatttcaaaccaaagaaattgttcagtaccaggctaacgaagataaaaacgcggtcgg

SEQ ID NO: 8766 - protein, 128 aa, Homo sapiens
AYFITLPFFRWSIFLIWLSIIVELLSEPFFIVNQFMLNYAARSRFESIAVTTGCIVNFIVVYAVQQSRYPMGVVTSDIDKEGIAILAFALGKLAHSITLLACYYWDYLKNFKPKKLFSTRLTKIKTRS

SEQ ID NO: 8767 - DNA, 391 bp, Homo sapiens
gcactgggtggtacagtcgaaaaatcaacggctggctggggagtgggcattcatcattaccaagtgataagcaagatccctactcttcctggtataacagacattgccttttgcgcattccatcaagatcaagtcatccaaaaaccagaaaaactggatgtcttcttaacatccgagttctgtgagtttgcagggttgatttaccaagatcgcattcttacttttcagggtcatccagagttctcgaaagcatatgaaaatgaacttgtagaattatacgatggcgtgatgctaacaccagaaatggcagacaaggcacgccaaacgatacaagaagacaacattcagaataagccactcatgtcttgggttgctcaatttctgaacgcgt

SEQ ID NO: 8768 - protein, 130 aa, Homo sapiens
ALGGTVEKSTAGWGVGIHHYQVISKIPTLPGITDIAFCAFHQDQVIQKPEKLDVFLTSEFCEFAGLIYQDRILTFQGHPEFSKAYENELVELYDGVMLTPEMADKARQTIQEDNIQNKPLMSWVAQFLNA

SEQ ID NO: 8769 - DNA, 209 bp, Homo sapiens
  misc_feature (1)..(1): Wherein n may be a, c, g or t
ngcgaaagtctagcctgggttacggccccagtgatcctggacaaatttggagtaagaaactcccgccagtctcatggccagagtgcccagggaaagtcttctctcccagtggtgactccgggtttccctagcccagcacaaggacttgggctggggagctacagaattgcaaagaagagcaggagccagccagccagacctggccatgg

SEQ ID NO: 8770 - protein, 65 aa, Homo sapiens [sequence omitted]

SEQ ID NO: 8771 - DNA, 325 bp, Homo sapiens
acgcgtgtatcacactccagcctctgatgtcactggctaggagacattggcaaaaacagggggtcagctgcagaactggagtgaggggatacaacatgtcggtaagtgcaggtgggaaagggattcaaggcggtcatgaaaatgccctggggccccagagagccggcctccaagccagatgtctgggtaagagggttcccagtcaagcagtgggggaggccctggggctgcaaaggaaaactttgggaaagggccctgggttgcggaatctgagcagctggggaccttgagctgcagcccgggctgggcaaccgcccggaagggt

SEQ ID NO: 8772 - protein, 87 aa, Homo sapiens [sequence omitted]

SEQ ID NO: 8773 - DNA, 237 bp, Homo sapiens
acgcgttggtcggataacgtgcgcattctggaattactggcgcaaaatgacattatggaagagcaggaggcgctggagcttacccatgcttatacgacgctgcgtgatgaacttcaccatcttgccttgcaggagcttccgggccatgtggcgccagagtgctttgaggctgaacgtacgctggtgcgcgacagctggcagaagtggctgggtgccgagtgaagtgtgctattattg

SEQ ID NO: 8774 - protein, 73 aa, Homo sapiens
TRWSDNVRILELLAQNDIMEEQEALELTHAYTTLRDELHHLALQELPGHVAPECFEAERTLVRDSWQKWLGAE

SEQ ID NO: 8775 - DNA, 381 bp, Homo sapiens
gtacagcccatcttgaataagcataccttctgtgctggccttaccaagtatgaggaagacacttgctatggtgacgctggcagtgcctttgccgtccatgacacggaggaggacacctggtatgcagctgggatcctgagctttgacaagagttgtgccgtagctgagtatggtgtgtacgtgagggcaactgatctgaaggactgggtccaggaaacaatggccaagaactagttcagggctgactagagggctgcacacagtggggcagggcaattcaccctggaagaggaagtagaagggttggggacataatctgagggctgctagccctgcattgctcagtcaataataaaaaacgagctttggacccaaaaaaag

SEQ ID NO: 8776 - protein, 77 aa, Homo sapiens
VQPILNKHTFCAGLTKYEEDTCYGDAGSAFAVHDTEEDTWYAAGILSFDKSCAVAEYGVYVRATDLKDWVQETMAKN

SEQ ID NO: 8777 - DNA, 463 bp, Homo sapiens
  misc_feature (1)..(1): Wherein n may be a, c, g or t
ncccaacctaatcagttttagcatatgcagaaggagcacttacgaaaccaccaatgaacttcacattgcccaatcatgatgtccagcccagccctcattttactcagcccatcatcaacagttggaagaggttctctttctccttcctttttgaatcacatttttctcttattttctgaagctgctctcagattttccacttatccattcagttaccattctgagtctctttaccacctccttcgtagctccctgactgctaaacatggaatcacaaagggctcttatttttgtattgtcaactcgctgtagatgatctcaaccagtcttatagctttaaagtctatgctaaacactgctacgtttatatgttcaggcagacagttttgctcagttcacattcataactcacctgcctattgacatcactgcctacatgtggtttgatatactatatcattca

SEQ ID NO: 8778 - protein, 78 aa, Homo sapiens
MMSSPALILLSPSSTVGRGSLSPSFLNHIFLLFSEAALRFSTYPFSYHSESLYHLLRSSLTAKHGITKGSYFCIVNSL

SEQ ID NO: 8779 - DNA, 396 bp, Homo sapiens
  misc_feature (1)..(1): Wherein n may be a, c, g or t
  misc_feature (2)..(2): Wherein n may be a, c, g or t
nnggatccgatcttctcgagttgaattgtgctgtgctaagctgatatggatgcgtgccattaatagcttcaattgcgccacgatgtgaagatgcaggtggcctccattttacaagtacgtcctccatttttcccacaaatacattttcttctcttcttcttctgcttttttgtttcgaaatcacgagttgcctcacagaggggaactcacttcttggtaagaatctgttttgagcctccgcttcagggctgtaggatgggaaagttatgtcgcccccatctaaaacatcttctatacttgtgttacactgcatatttttctaatatttcttggctatctgtaagcaaatctacatccaggaatagagggcacaagtatattccatataaaagcaca

SEQ ID NO: 8780 - protein, 102 aa, Homo sapiens
MQVASILQVRPPFFPQIHFLLFFFCFFVSKSRVASQRGTHFLVRICFEPPLQGCRMGKLCRPHLKHLLYLCYTAYFSNISWLSVSKSTSRNRGHKYIPYKST

SEQ ID NO: 8781 - DNA, 318 bp, Homo sapiens
agatctctccaagaagctgcaaggatgctgtccgtgcgcatcgccgcggccgtggcccgtgccctccctcgacgggcgggactggtctccaaaaatgccttggggtcatcttttgttggtacaagaaatctccatgcctctaacactcgacttcagaagactggcactgccgagatgtcctccattctcgaggagaggattctgggagctgacacgtctgttgacctggaggagactgggcgtgtgttaagcattggtgatggtattgcgcgagtgcacgggctgaggaatgttcaagcagaggagatggtgtaatta

SEQ ID NO: 8782 - protein, 96 aa, Homo sapiens
MLSVRIAAAVARALPRRAGLVSKNALGSSFVGTRNLHASNTRLQKTGTAEMSSILEERILGADTSVDLEETGRVLSIGDGIARVHGLRNVQAEEMV

SEQ ID NO: 8783 - DNA, 364 bp, Homo sapiens
ccgcggctacagggggcagagtgaaagtcaaacaaggacacgggcagggcaggggcccatggagactggagacaagagtcggcaacggcactgtcagggtggcagcactgtcactcctcggactgctacgtcagtacccatgagcaacgcattcgcagtggctgctggactgctgtggggcaggcctcggcgggagccacacagaaaggccctgggaaggggtcagaagactctaaccagtctgcagtggaagtgaggtcaacactaagtgcaggaggaactcagaggggtggcaactgacggagagcaggagttggagcgctggggtctcccaagggcagggcccagcacagccacctggccc

SEQ ID NO: 8784 - protein, 65 aa, Homo sapiens [sequence omitted]

SEQ ID NO: 8785 - DNA, 386 bp, Homo sapiens
  misc_feature (386)..(386): Wherein n may be a, c, g or t
acgcgtgatgatcatgaaaatggtacagagcgtctagcagaagtcgcctctgtgatgggctggcagcaagatgaaatcatcgttaacgtacaaggggatgaaccctttctgcctgttgcacttattcatgccacggttaaagcgttagccgatgatgctgaatctgaaatggccacgattgcctgtgcgattgataacgtagcagagctgtttaacccaaatgtagttaaagtcgtttgtgatgaaaaacagcgcgccttgtatttcagtcgtgcgcctatgccatgggaccgtaatggttttatggaaaaaacagacgatcaagcgttaccagcggattttcctgcgttgcgtcatattggtccgtatgtttaccgcacgacatn

SEQ ID NO: 8786 - protein, 128 aa, Homo sapiens
TRDDHENGTERLAEVASVMGWQQDEIIVNVQGDEPFLPVALIHATVKALADDAESEMATIACAIDNVAELFNPNVVKVVCDEKQRALYFSRAPMPWDRNGFMEKTDDQALPADFPALRHIGPYVYRTT

SEQ ID NO: 8787 - DNA, 403 bp, Homo sapiens
tcagccgcgattcagcgaatgaaagatgcacgtcttccgtatctggttgtgttgacacatcctgtctatggtggtgtaaccgcttcactcgcgatgttaggcgatgtacatattgctgaacctaaagcgatgattggatttgcaggaaagcgcgtaattgagcaaacagttcgtgaaaagttagaagaaccattccaacgtgctgaatatttgcttgatcatggtgtggtcgatcaaattgttcatcgtcatgcattacgtgatactgtatatagacttgttgctaaattgatgaacttaccttgacacagcaaacaccacattctgatgatacattaacaacatggctcgattattggagccatgttcacgttacgggcattgatttaggattggcacgcgt

SEQ ID NO: 8788 - protein, 101 aa, Homo sapiens
SAAIQRMKDARLPYLVVLTHPVYGGVTASLAMLGDVHIAEPKAMIGFAGKRVIEQTVREKLEEPFQRAEYLLDHGVVDQIVHRHALRDTVYRLVAKLMNLP

SEQ ID NO: 8789 - DNA, 380 bp, Homo sapiens
  misc_feature (1)..(1): Wherein n may be a, c, g or t
  misc_feature (2)..(2): Wherein n may be a, c, g or t
  misc_feature (317)..(317): Wherein n may be a, c, g or t
nntgtacaggtatgtatctcctttttttaaaaaaattttttggaggcagggtctcactctgtcgcccagatggcagtgcaacggcacaatcacaactcaccacagcctcaacctcctgagctcaacggactatccccactcagcctcccaaagtgttgggaccacaggcgagagccaccgcaactggccaactttatatgtatttataaatttatagaaaacatccagaaaaataaacaccaagctataataattccttctaagaagagagtgagtttggaacaaagaggaagacatgggagattttcactacatanagatctctatgatctgatattctttaaacagtatgcatttcttttataatttagaaaaggaaa

SEQ ID NO: 8790 - protein, 111 aa, Homo sapiens
  misc_feature (96)..(96): Wherein Xaa may be any naturally occuring amino acid
KNFLEAGSHSVAQMAVQRHNHNSPQPQPPELNGLSPLSLPKCWDHRREPPQLANFICIYKFIENIQKNKHQAIIIPSKKRVSLEQRGRHGRFSLHXDLYDLIFFKQYAFLL

SEQ ID NO: 8791 - DNA, 282 bp, Homo sapiens
gatcttatcaaagattatccgatgatgcgcttagtgcaaggcgatgtgggctcgggaaaaacattggttgccgcattggctgctttaactgcaattgataatggcaaacaagtcgccttaatggcgccaacagaaattcttgcagaacagcatgcgaataattttagacggtggtttaagcctttcggtattgaagttggctggttggcaggtaaagtaaaaggaaaatcaagacaagcagagcttgaaaaaatcaaaactggcgcggtgcaaatggtggtg

SEQ ID NO: 8792 - protein, 94 aa, Homo sapiens
DLIKDYPMMRLVQGDVGSGKTLVAALAALTAIDNGKQVALMAPTEILAEQHANNFRRWFKPFGIEVGWLAGKVKGKSRQAELEKIKTGAVQMVV

SEQ ID NO: 8793 - DNA, 430 bp, Homo sapiens
  misc_feature (202)..(202): Wherein n may be a, c, g or t
  misc_feature (203)..(203): Wherein n may be a, c, g or t
  misc_feature (211)..(211): Wherein n may be a, c, g or t
ctggggatcatgccctacatcactgcgtcgatcatcctgcagctgctgacagtcgtgatcccgaagctggaaacccttaagaaggagggcgcgtccggtcagaacaagatcacccagtacacccgttacctcactctcgtgcttggcctgttgcaggcaacggccttcgtcacgcttgccacctccggccgtctattcaccnntgcagctntgccagtcgtctactccacctcggtcttcgaagtcgtcgtcatgatcctgactatgacggccggtacgaccatcgtcatgtggatgggtgagctcatcaccgaccgcggtatcggcaacggtatgtcgatcatgattttcactcagattgcggcgcgtttccctgactcgctgtggtctatcaaggtcgctcgaaatggcgccggtcaggctcacgcgt

SEQ ID NO: 8794 - protein, 143 aa, Homo sapiens
  misc_feature (68)..(68): Wherein Xaa may be any naturally occuring amino acid
  misc_feature (71)..(71): Wherein Xaa may be any naturally occuring amino acid
LGIMPYITASIILQLLTVVIPKLETLKKEGASGQNKITQYTRYLTLVLGLLQATAFVTLATSGRLFTXAAXPVVYSTSVFEVVVMILTMTAGTTIVMWMGELITDRGIGNGMSIMIFTQIAARFPDSLWSIKVARNGAGQAHA

SEQ ID NO: 8795 - DNA, 315 bp, Homo sapiens
gaattcggagtgatatggaaccacagttggtatcatgtacgcctcacatgagaaggaggtatctagcacttctcgaccagggcctaaagctttatgttaaaaggaaaattatatagtagaactgtcaaagacttgagtattttacaaaaaggttttgaaagatcatatactctttcttcaaggacttcattggagaggtttttgtcactcttggagttagaatcaaagaaacctaaggaactttgctttatgcatgtctgggcaagtagtgtgacttgcaagaaatttccgagattcaccattcattgttgatca

SEQ ID NO: 8796 - protein, 72 aa, Homo sapiens [sequence omitted]

SEQ ID NO: 8797 - DNA, 250 bp, Homo sapiens
cggtcgcggacgcgcggtcggactggttcgtgcgccggctgtcgacgcaggcaggtgacacgcttcacggctgaccgggcggtaattcgcttggtccggtttaagtccttacggaagaatgtcccggtgcgtaccccgaccctcgacccgctcgtccgacgactcttcgtgggcatcgcgttctccgctctcggcagcggactcacgatgccgttcctgtacgtttacctggcggaggtccgggggatcc

SEQ ID NO: 8798 - protein, 58 aa, Homo sapiens
MPTKSRRTSGSRVGVRTGTFFRKDLNRTKRITARSAVKRVTCLRRQPAHEPVRPRVRD

SEQ ID NO: 8799 - DNA, 341 bp, Homo sapiens
ctgcactccacatgcatcgcttttgttgagtttgtccaagcagatagtgctattctcgctctgaactgcagtggcattgttcttggaacgcttcctgttagggtgagcccatcaaagacaccaatccgctcgcgatcgccccgtgtgacgtcatactgaattcggctcatctgaagccgtcgtccagggcagcaaatttctgggcaacaaagccctagtcgtgtggccttagagactgccgcatcgcggataagtaattgtcgttgagcagagttctcgttggttaaagtccagtctagtaggaggcgcagagacccgtctgtatggtcgctgggagatct

SEQ ID NO: 8800 - protein, 52 aa, Homo sapiens
LHSTCIAFVEFVQADSAILALNCSGIVLGTLPVRVSPSKTPIRSRSPRVTSY

SEQ ID NO: 8801 - DNA, 161 bp, Homo sapiens
  misc_feature (1)..(1): Wherein n may be a, c, g or t
ntcggatggccggtctttccgactgcgcggcgcgacggcaagcgccgatggacatgtcgaagtcccggcaaaaggtgcgcatcacttatatgaagcgggcggagccaccgagccctgcgatcttcgagtggcgggcgggagtgatcatgggctggttcgac

SEQ ID NO: 8802 - protein, 52 aa, Homo sapiens
MAGLSDCAARRQAPMDMSKSRQKVRITYMKRAEPPSPAIFEWRAGVIMGWFD

SEQ ID NO: 8803 - DNA, 306 bp, Homo sapiens
acgcgtagtaccccagaatcagaaaaaatgattctagacgcgcttcattggttaggacttgattgggcagaaggtccagatgttggtggtgaatatggcccttaccgtcaaagtgagcgtggtgatatttacggccaatacccatgggagttgggggaaaaagggcatgcattttatgcctttgaaacatcagaagaactcgatcaaatgcgtattgagcaaaaagaacaaggtttgcagcagaaatacgatggtcgagcattggcattgagcgctgaagaagtacaagccaagctagacgccggc

SEQ ID NO: 8804 - protein, 102 aa, Homo sapiens
TRSTPESEKMILDALHWLGLDWAEGPDVGGEYGPYRQSERGDIYGQYPWELGEKGHAFYAFETSEELDQMRIEQKEQGLQQKYDGRALALSAEEVQAKLDAG

SEQ ID NO: 8805 - DNA, 399 bp, Homo sapiens
  misc_feature (399)..(399): Wherein n may be a, c, g or t
atcttgctctgttgccctggccgttctctgactcctggccttaagcgaccatcctgcctcggccttccgaagtgttggtgttacagatgtgaaccaccacacctggctcagatacatcttgattttagagatgttaaaatacaaaaacaaaaaagtatcttagaactggtgaaataccaggctttagtaaatactgactgttgcctagtgaagcttggctctcactggcaatttcctcaaacaatatgtaatctttgaagatttaaacccagtccgcaaaaccattatttgagcctgcttctaattcattataatttgagttttcatgaacacattcaatatccgggtttgcaggaaccttggagattatctaatgcaaatctatgtggaacttaaatn

SEQ ID NO: 8806 - protein, 85 aa, Homo sapiens
ILLCCPGRSLTPGLKRPSCLGLPKCWCYRCEPPHLAQIHLDFRDVKIQKQKSILELVKYQALVNTDCCLVKLGSHWQFPQTICNL

SEQ ID NO: 8807 - DNA, 150 bp, Homo sapiens
acgcgtgaactgaacccatacctcaggggaattggttcggactacagcaacggcgtcaacttcgccatggcaggctcgacggtgacccacggcgtctctccctactccttgaacgtccaggtcgaccagttcgtctacttcaggcacaga

SEQ ID NO: 8808 - protein, 50 aa, Homo sapiens
TRELNPYLRGIGSDYSNGVNFAMAGSTVTHGVSPYSLNVQVDQFVYFRHR

SEQ ID NO: 8809 - DNA, 300 bp, Homo sapiens
  misc_feature (1)..(1): Wherein n may be a, c, g or t
  misc_feature (2)..(2): Wherein n may be a, c, g or t
nntccggaagaggtttctgaccttaagtctccgctgagctcaaggttcagagaacctctcacccacgctcggttccaggagctcttcgggggcgcagagccggagccggagctgccagcggagccctgcctaccctgcttgtgcaggctgcggaggaggcgagccagcgcctgttctgggccgggggcgtggcgcgtgctgctggcacggctgcccccgctgcgttggctgccccaataccgctggcgagcctggctgctcggagatgctgtggctggagtaaccgtgggcgttgtgcac

SEQ ID NO: 8810 - protein, 100 aa, Homo sapiens
  misc_feature (1)..(1): Wherein Xaa may be any naturally occuring amino acid
XPEEVSDLKSPLSSRFREPLTHARFQELFGGAEPEPELPAEPCLPCLCRLRRRRASACSGPGAWRVLLARLPPLRWLPQYRWRAWLLGDAVAGVTVGVVH

SEQ ID NO: 8811 - DNA, 355 bp, Homo sapiens
acgcgtgaggaaatgggggccgcaggcctggatcgcaaggtatggcagtgcccggtcgtcctcctgagcgatgttcattcggtaggggtacagggtgacgggcgtacttatggttctcccattgtgcttcgcccggtgacgagtgaggacgccatgactgcggactgggcacgtatcccatatgacgtactggaaaagatctcgactcgcattacgaatgcgtgtccgcaaatcaaccgggtggtactcgatatcacatctaaaccgccggccaccatcgagtgggaatgagccccgtctcaccgtgaacatgacatggcccgcacctttcttggggcgggccatgccgtgttag

SEQ ID NO: 8812 - protein, 96 aa, Homo sapiens
TREEMGAAGLDRKVWQCPVVLLSDVHSVGVQGDGRTYGSPIVLRPVTSEDAMTADWARIPYDVLEKISTRITNACPQINRVVLDITSKPPATIEWE

SEQ ID NO: 8813 - DNA, 265 bp, Homo sapiens
  misc_feature (184)..(184): Wherein n may be a, c, g or t
gaagcctttgcccatcttcagaacaggctgatcgccaccaagaaccctgaagaaatccgaggtgggggtctccttaagtacagcaacctccttgtgcgggacttcaggcctgccgaccaggaggagatcaagaccctggagcgttacatgtgctccagatttttcatcgacttccccgacatcntggaacagcagaggaagctggagacctaccttcagaaccacttctcggacgaggagagaagcaagtacgactacctcatga

SEQ ID NO: 8814 - protein, 88 aa, Homo sapiens
  misc_feature (62)..(62): Wherein Xaa may be any naturally occuring amino acid
EAFAHLQNRLIATKNPEEIRGGGLLKYSNLLVRDFRPADQEEIKTLERYMCSRFFIDFPDIXEQQRKLETYLQNHFSDEERSKYDYLM

SEQ ID NO: 8815 - DNA, 497 bp, Homo sapiens
  misc_feature (124)..(124): Wherein n may be a, c, g or t
tctagaggtactttatgcgatccattctgaagatgaagaaagtatggaaatgacagttaatgaacaaaggtcacacaggcgactggcggaagacctaaggtttgaacctaaacagtctggctcncaatggcatgcttttaaccactatgctgtacagccaagactatcaaattcaccttggctggtctgagaattataaagaccactacctactcagaccttttaatcccaccctgacagaaatacaaatacatgaaaacttctttccacatttactcaccaaagatctttgcgcagtgatccattcactgtgaccaccatctctcttcttagcacatgcgtgtagaaaatctagttccaaaatggagtcaatccaaccaaattaggaaattcctattctactcccctctgcacctcaagaatttcatacaactgaatgttgatctcaacagaaatcttgtggctcatcactcatctacaagaactgctaactaagg

SEQ ID NO: 8816 - protein, 60 aa, Homo sapiens [sequence omitted]

SEQ ID NO: 8817 - DNA, 324 bp, Homo sapiens
  misc_feature (1)..(1): Wherein n may be a, c, g or t
  misc_feature (2)..(2): Wherein n may be a, c, g or t
nnccatggagggtgtggagcagaggaggaaggtgccgtgacttccagtttagctgcatgcattctggctgcatcaggaaaagggatcataggagggtggtgggagcacaggagggtgaattgagaggctgtggcaacgatccaggcaggggctgggggcttggaccagaagataaccaggagtggggcagagaagttcctcatcccacctcttagggaggcttctccagaactgtccccacccccacccctccctgcaccccggcccaggcagtgttcactcagaaagccctgccagccacccccaggaaaggcccaggctagc

SEQ ID NO: 8818 - protein, 67 aa, Homo sapiens [sequence omitted]

SEQ ID NO: 8819 - DNA, 288 bp, Homo sapiens
gcgtgtccaacaatgaacgctggccctcacacggattatttatggctggacgcaaacaatagacaggtttcactgccagctagtcagtacatagatttggccctcacgtggataaataacaaagtgaacgataaaaacttgtttccgaccaaaaatgggctaccattcccgcagcaattttcgagagatgtgcagagaatcatggtacagatgttcaggatattcgcacatatttatcaccaccactttgacaaaattgtgcacttgtcattagaagctcattggaat

SEQ ID NO: 8820 - protein, 96 aa, Homo sapiens
ACPTMNAGPHTDYLWLDANNRQVSLPASQYIDLALTWINNKVNDKNLFPTKNGLPFPQQFSRDVQRIMVQMFRIFAHIYHHHFDKIVHLSLEAHWN

SEQ ID NO: 8821 - DNA, 495 bp, Homo sapiens
acgcgtctgacagccacactatctaaccctctatctaaccctctatctacagaccctcgcgacatgcgagcgcgaaagtgatttccctccctcttctcccacaacggtgaagaaaattaatccgcatggtgtggacgctgcgaactatccaggggatattcaaaagaggagagcgtttctataggtagaacggtgcactaacacaatgcgctgtataagaagtgcgccgtgtgagaaatataccgtgtgagaacgcgctagcatactgtgtatatggtgagtgcatagtgtatgtccacaaagtgtatgcacacagagtgtgtacgcatactggagggagttactgtgagcggcttttatgaccaaaattttcaggtgaaaactactgccggtgacactgtaaatctcgctgatttctcggggaaagtactgctagtagttaatacagcatcgaagtgtggattcaccccacaatttgagggactggagaagctt

SEQ ID NO: 8822 - protein, 68 aa, Homo sapiens
MSTKCMHTECVRILEGVTVSGFYDQNFQVKTTAGDTVNLADFSGKVLLVVNTASKCGFTPQFEGLEKL

SEQ ID NO: 8823 - DNA, 273 bp, Homo sapiens
caattggaaagacagggtcatcctggtgacttacttcatgaccagtcaccacaaacagggagtggaacaggacccccacagctaatcccccagcacgagtcttcctctccttcatacacacgcaatccaatctcacattcttttttctctcctgttggctcacattcatgacctcacctctctgcgccctgtccctcaggccttcctcaccccattcccctcccacaggggagatccacctgccaggcaatgtcagatgactgaatccccaga

SEQ ID NO: 8824 - protein, 56 aa, Homo sapiens
MNVSQQERKKNVRLDCVCMKERKTRAGGLAVGVLFHSLFVVTGHEVSHQDDPVFPI

SEQ ID NO: 8825 - DNA, 347 bp, Homo sapiens
acgcgtagctcagctcattctaactcatctttcaaaactcctcagggtgtcaccttccccagaggacccctcttttctcttgaaccctgtgttagctgcccatcctgtaagggcactgcttatctgtatcacattaattgagctactgtacacagagactgtgccttttatttccatatctccaacacccagaccagagctgttaagactgaatgaataaatgaatgaatgaatgaatgaatgtgtatacattgtgtatacaccaaggtatgaaataataaataaagcatgttaagaatgtttgtaaactacaaagcacccatcagttgtaggggcctgttatttct

SEQ ID NO: 8826 - protein, 75 aa, Homo sapiens [sequence omitted]

SEQ ID NO: 8827 - DNA, 285 bp, Homo sapiens
  misc_feature (1)..(1): Wherein n may be a, c, g or t
nacgcgtgggctggcaacgcgcaccgttcgtgaccaattcaccacacgcagcccgtgcccgccatcgaggctggcgagccgcacctagacttgacggcgacgagatcgacgttacggaaggttcccatgaagattctcatcaccggcggggccggttacatcggatcaacggttggttcggcatgtgaggaggccggccatgaggtcgtcgtgctggacgacctatccgcgggacgccgcgaattcgttcgcgaccgcacgttctacgagggcgacatcgctgat

SEQ ID NO: 8828 - protein, 53 aa, Homo sapiens
MKILITGGAGYIGSTVGSACEEAGHEVVVLDDLSAGRREFVRDRTFYEGDIAD

SEQ ID NO: 8829 - DNA, 385 bp, Homo sapiens
  misc_feature (1)..(1): Wherein n may be a, c, g or t
  misc_feature (2)..(2): Wherein n may be a, c, g or t
  misc_feature (136)..(136): Wherein n may be a, c, g or t
  misc_feature (137)..(137): Wherein n may be a, c, g or t
  misc_feature (262)..(262): Wherein n may be a, c, g or t
nngtgcactatttagctaataaggaattatctgcttatttggaatggctgcatatttgttgtcatcaactcagtatccaaggtcctaaacctgggtcagagcaatcccaaacttctgtatagactggagaaattgnngactgagagcaggcctgcagagacagacttcagggtactggtggatgaaaaacccattggcttgagttgccagtgtgtgcttgcacacaaggaagccaactgtatcctgagctgcatcaaaaganctgtgacaggcaggttgagggaagtgattgtctttctctaatttgcccttttgaggcccccctcatagtactgcattcagctatgggggccccagcacaaggacatggacctggagtggatcc

SEQ ID NO: 8830 - protein, 95 aa, Homo sapiens
  misc_feature (41)..(41): Wherein Xaa may be any naturally occuring amino acid
  misc_feature (83)..(83): Wherein Xaa may be any naturally occuring amino acid
LIRNYLLIWNGCIFVVINSVSKVLNLGQSNPKLLYRLEKLXTESRPAETDFRVLVDEKPIGLSCQCVLAHKEANCILSCIKRXVTGRLREVIVFL

SEQ ID NO: 8831 - DNA, 308 bp, Homo sapiens
tccggagcggcggtgctgttgctccgtgaagctgatggtcgacgccatcttgccttatggatcgcggatcctgaaaaagcagccattgcggatgccatcaacgaaacggaacctgtgcgtccccttacccacgacctactggcgcgtgtcatcgcagtcctgtgtgaggaagagccgcagtgcatcattaccaaggttgaggacggcatttggttcggtgaactggtgctaggcgatatgcgtatcgacgctcgaccctccgatctggtggcccttgccctacgtctgccagtaccgatctggtgcac

SEQ ID NO: 8832 - protein, 102 aa, Homo sapiens
SGAAVLLLREADGRRHLALWIADPEKAAIADAINETEPVRPLTHDLLARVIAVLCEEEPQCIITKVEDGIWFGELVLGDMRIDARPSDLVALALRLPVPIWC

SEQ ID NO: 8833 - DNA, 356 bp, Homo sapiens
gaattcaatagaagatgggaatgaaaatcaggaactgtgatcgaccgcatctgcgttaagtaaggtcaaaagcgtcactacacttcgccaatacaccgctttcgcgctaccgtgacccggccacgaacgggaatgcacatggcaccagcgaaggacacggacgaagatgtcggcttgctgcggatcggcctgttcttcgacggcacccgcaacaacgcacacaacctggcgcgcggccgtccgcaggttccgcagcctcgaccggcgcagctgcgcgcggacgatgattcgacctactagagccggctgaccagcagctacgacaacggcctgaccaacatcgcgcgcctgcagca

SEQ ID NO: 8834 - protein, 55 aa, Homo sapiens
MHMAPAKDTDEDVGLLRIGLFFDGTRNNAHNLARGRPQVPQPRPAQLRADDDSTY

SEQ ID NO: 8835 - DNA, 467 bp, Homo sapiens
  misc_feature (1)..(1): Wherein n may be a, c, g or t
  misc_feature (95)..(95): Wherein n may be a, c, g or t
  misc_feature (467)..(467): Wherein n may be a, c, g or t
nccatggcaagtgaagtcaggtttctcgtcgcatgtggctcaggaatcgcaacatccacggtcgctcaggaaaaggttagggagatctgcgggantgccaaaattcccgcaaagattaccaaagggactgtgggacagctgccagttctccaggacggtgtcgatgtcatcatgctgacgacccgctacggcaagccgttgaacaagcccgtcatccaggtgttcggtctcatttcgggcatcaacgaagacactgtggcagaagaaatcatctccacgtgtcgagatgtcttgaaccagtcatgatcttctaggagcacttcataatgtcaattataaagggcattcttgacgtcggagccgtggttatcttgccgatcgtgatgctgattctttgcctgatcttcaggatgcctttcggtaagtccctcaaggccggtctgatgatcggtatcggattctctggn

SEQ ID NO: 8836 - protein, 101 aa, Homo sapiens
  misc_feature (1)..(1): Wherein Xaa may be any naturally occuring amino acid
  misc_feature (32)..(32): Wherein Xaa may be any naturally occuring amino acid
XMASEVRFLVACGSGIATSTVAQEKVREICGXAKIPAKITKGTVGQLPVLQDGVDVIMLTTRYGKPLNKPVIQVFGLISGINEDTVAEEIISTCRDVLNQS

SEQ ID NO: 8837 - DNA, 359 bp, Homo sapiens
gggcccacgcactcttctgggtgtcatgcaagggtacaccccgatccaagtgactgcaaactctcccaacgcatgaataacaacctggtggtggtttgaggggatggggtaagaagaactaaaacctaataaataagcaaagcaaataagttcaaatagatgacaagtgcagtacagaaataacatgtgccctaatgactgggggatgaggctgcttaagtcgggggtaagacgcctcttcgaacgggctacatccaagatgaggccttaggagaaggcagaggcagccttcatagagaaggtggcttgactttccatacctgtgtctgcccacacctgctgcccactttaaatctaga

SEQ ID NO: 8838 - protein, 62 aa, Homo sapiens
MLFLYCTCHLFELICFAYLLGFSSSYPIPSNHHQVVIHALGEFAVTWIGVYPCMTPRRVRGP

SEQ ID NO: 8839 - DNA, 319 bp, Homo sapiens
tcatgaggttgcagttaagctgttgggtggggttgatgtcatcccaacacatgactggggtgtcagggcctgcttgcaagctcactcatgtagttgtaagcagataccagcttttcaccacgagggcctctccacagggctattcccaacatagcgacctgtttctcccaagtaagtgatgcaagatggaggccatggttctttataatctaacctcggaaggtgacatagtatcacctctgtcataccatatgctattgatcatacagaccagctgggagggaactgtaagggtatgaataccagcaggcagtgatca

SEQ ID NO: 8840 - protein, 58 aa, Homo sapiens [sequence omitted]

SEQ ID NO: 8841 - DNA, 312 bp, Homo sapiens
  misc_feature (1)..(1): Wherein n may be a, c, g or t
  misc_feature (2)..(2): Wherein n may be a, c, g or t
  misc_feature (55)..(55): Wherein n may be a, c, g or t
  misc_feature (118)..(118): Wherein n may be a, c, g or t
  misc_feature (124)..(124): Wherein n may be a, c, g or t
nncaattgaccgctcagtcagttaattttgataatatttacctacaacaatactnagtgcgcccgtcgcacaaaataggagaacggcatgcttgagctcactgtagagcagatatcantgggcnaggtggctgtggataaatctgctgccttgcacctgctcgctgacaaattagtggccgatggcctggttgccgaaggttatctcagtggcttgcaagcccgtgaagcccaaggctcgacctttctcggccaaggcattgctatcccccatggcacgccagaaacccgagaccaagtgttttccaccggt

SEQ ID NO: 8842 - protein, 75 aa, Homo sapiens
  misc_feature (11)..(11): Wherein Xaa may be any naturally occuring amino acid
  misc_feature (13)..(13): Wherein Xaa may be any naturally occuring amino acid
MLELTVEQISXGXVAVDKSAALHLLADKLVADGLVAEGYLSGLQAREAQGSTFLGQGIAIPHGTPETRDQVFSTG

SEQ ID NO: 8843 - DNA, 315 bp, Homo sapiens
cagcagtagccttccgcaagcactctctgtccctgaggcctacaggagggaggaagtgaggaaagcaaagtggagagatggaggggaaggcacagggagccgagaagatggcagagcttcctgaccaggcacaggcaaagcagccggctgtctgctcggcatgatccaagtgtcaaagtgagtagacaagaagggttccatctccaaatctgcctgctcagctctgtggatggactgaagtcatggtgagctgccctcgggacccccaagtagaaatgcaacgatgttggaagaacacaatggctcacctggcca

SEQ ID NO: 8844 - protein, 53 aa, Homo sapiens
MEPFLSTHFDTWIMPSRQPAALPVPGQEALPSSRLPVPSPPSLHFAFLTSSLL

SEQ ID NO: 8845 - DNA, 199 bp, Homo sapiens
ccatggttggattaaaacaggctaacttcgtacagtcagaaaaaggacgtggtggtgtttggcacttaataggagatatcgaaaaaattacgcttcttgatatttataatgctgttggtgaaccaacaatttttgcaatgggcaatgaaagaaaaaatccggaatgtgctgtagaacaagttgtcaatgcagctctaga

SEQ ID NO: 8846 - protein, 65 aa, Homo sapiens
MVGLKQANFVQSEKGRGGVWHLIGDIEKITLLDIYNAVGEPTIFAMGNERKNPECAVEQVVNAAL

SEQ ID NO: 8847 - DNA, 329 bp, Homo sapiens
  misc_feature (329)..(329): Wherein n may be a, c, g or t
acgcgtcagcctgagcccaataactataaaagagtcgcaaccatgactgtgctattgagtgagcgcagccagattttccggggtgccgatgcctacgcggtgtcggactacgtcaaccagcatgtgggcagccactgcattcgcctgcctcccaagggccggccacgggcgagtatcagccatcgcacctttgccagcctggacctgtgccgcatcagctacggcgctccggtacgggtcacatcggtggcgctggagaccatctatcacctgcagatcctgttgagcgggcattgccgctccagctcccgtggtgaggatgacgtggn

SEQ ID NO: 8848 - protein, 109 aa, Homo sapiens
TRQPEPNNYKRVATMTVLLSERSQIFRGADAYAVSDYVNQHVGSHCIRLPPKGRPRASISHRTFASLDLCRISYGAPVRVTSVALETIYHLQILLSGHCRSSSRGEDDV

SEQ ID NO: 8849 - DNA, 350 bp, Homo sapiens
cggccggtagtgttcagcctttcactactccttctctgccactcgacttcttgccagctggtgtccagttacattttggcaaaggtggtcaccgggcagacctggagagagggaagacatggaagccctctctgccctctgcagtggcatcgtgagacgtggtctctgaataacagaagatcttcttcagaaacctcaagctccgatgatgccttcagacccatgaagatggagtgtgaaattccatgaatatcgagtctattttctggaccccagaggtgagcatgggctgacagagaatgcatcattcacacatctcccaggactgtgagggtgggagatgcacgcgt

SEQ ID NO: 8850 - protein, 79 aa, Homo sapiens
MMHSLSAHAHLWGPENRLDIHGISHSIFMGLKASSELEVSEEDLLLFRDHVSRCHCRGQRGLPCLPSLQVCPVTTFAKM

SEQ ID NO: 8851 - DNA, 258 bp, Homo sapiens
cctgctgaatgtcacttaatgagatgtggtcaagagagtcatgtactggcttccaccttggttcctggtgatttagtgcacttcagaataggtgacagaatccccgcagacattagaattattgaagcaatcgatttatccatcgatgaaagtaatttaactggtgaaaatgaaccggtacataaaacctcacaaacgatcgaaaaatcttcctttaacgatcagcctaattcaattgtaccgatttccgagagatct

SEQ ID NO: 8852 - protein, 86 aa, Homo sapiens
PAECHLMRCGQESHVLASTLVPGDLVHFRIGDRIPADIRIIEAIDLSIDESNLTGENEPVHKTSQTIEKSSFNDQPNSIVPISERS

SEQ ID NO: 8853 - DNA, 361 bp, Homo sapiens
atcctcttcgggactcaagcccacaactgtccgccgacgttcgccctgttcacatcgggggtattcgaccaaggatatgtgcggttcatcatcaggcggctgcgtgaagactttggcttcgccggttcacccgtccatgtggagatccgacctcgggcgaggcggcagaagaagtgaacagttttgtcggcggaacggaagtacgctaatgtacttcttcgggtcaccgagtgatccaaaacgggctgtggcgcagtttggtagcgcacttgactgggggtcaaggggtcgcaggttcaaatcctgtcagcccgacgttttgaggttcccgcgagtctacgcttccgggctgatgcctagg

SEQ ID NO: 8854 - protein, 58 aa, Homo sapiens
ILFGTQAHNCPPTFALFTSGVFDQGYVRFIIRRLREDFGFAGSPVHVEIRPRARRQKK

SEQ ID NO: 8855 - DNA, 314 bp, Homo sapiens
  misc_feature (1)..(1): Wherein n may be a, c, g or t
ncaattgggtcatcagcgggtagccgtttggcgattgcgcgtgcgttgctcaagaatgcgccgttgctgatcctcgacgaggccacctcggccctcgataccgagtccgagcggcatatccaggcggcgctcgataaggtcatgcaaggccgcacaaccctggtgatcgcgcaccgtttgtccaccatcgagaaggctgacctgatcctggtgatggacgacgggcggattgtcgagcgcggtacccatggcgagttgttggcgcagaacggctattacgcccgcctgcatgccatgggtctggatgcaccggt

SEQ ID NO: 8856 - protein, 104 aa, Homo sapiens
  misc_feature (1)..(1): Wherein Xaa may be any naturally occuring amino acid
XIGSSAGSRLAIARALLKNAPLLILDEATSALDTESERHIQAALDKVMQGRTTLVIAHRLSTIEKADLILVMDDGRIVERGTHGELLAQNGYYARLHAMGLDAP

SEQ ID NO: 8857 - DNA, 257 bp, Homo sapiens
  misc_feature (1)..(1): Wherein n may be a, c, g or t
  misc_feature (2)..(2): Wherein n may be a, c, g or t
nnctggcctgcaccgccaccaagaaaaaggaaaagcgaattggaatttgagactctgaaaactcctgatatagatgttcccaaagagaatattacgtctgattctctcctaaccgcaagcatggcttcagaaagtacggttaaggattctcagccttctcttgatttggcaagtgctaccagtggagataaaatagttactgcccaggttggtgaattagtgttctgtttcatatagactttatcagctccccgcgg

SEQ ID NO: 8858 - protein, 78 aa, Homo sapiens
  misc_feature (1)..(1): Wherein Xaa may be any naturally occuring amino acid
XWPAPPPRKRKSELEFETLKTPDIDVPKENITSDSLLTASMASESTVKDSQPSLDLASATSGDKIVTAQVGELVFCFI

SEQ ID NO: 8859 - DNA, 267 bp, Homo sapiens
gtcgacacgaaaaacatggaggatacattcaaagtagagaaacttcttaagattctatgttggaattccctgcgtttaacaggttcttgcagtctggacttgactgcagcagagaagcactgctggattgagtattacacccaatacaaatcacatcttgcccactcacctagcaaatgcctccagcaaaagtgtgtctaccacaacaccactgccctgtcagagcggacacccaaaatagacacataacctgtaaggtcctgatca

SEQ ID NO: 8860 - protein, 77 aa, Homo sapiens [sequence omitted]

SEQ ID NO: 8861 - DNA, 403 bp, Homo sapiens
  misc_feature (186)..(186): Wherein n may be a, c, g or t
  misc_feature (236)..(236): Wherein n may be a, c, g or t
  misc_feature (289)..(289): Wherein n may be a, c, g or t
  misc_feature (299)..(299): Wherein n may be a, c, g or t
  misc_feature (318)..(318): Wherein n may be a, c, g or t
cctaggaaatcaaattcttaaaaataatagaaacactaaatgttcaataaaaagaaaatgatgaagtaattattgttagaacataattccacttagctatttataaattatgacacagatacatgttcataatatattgtaaaatggaaaaaattggtaacaaaagagtattacaatatgtccccnatcttttaaaacaaatatagttacaaatatagttttagaaaatatagatngaaatatgcacattaataactctacttttatgtatatttgtttcataatgaanaatgcatatntttaataaggtgaaatatnattacagcacgtgaaagaataacagattcagggtatttgaactaaagaaaacatagtaacacataagcacttatttcatagagaa

SEQ ID NO: 8862 - protein, 51 aa, Homo sapiens
  misc_feature (16)..(16): Wherein Xaa may be any naturally occuring amino acid
  misc_feature (33)..(33): Wherein Xaa may be any naturally occuring amino acid
MKQIYIKVELLMCIFXSIFSKTIFVTIFVLKDXGHIVILFCYQFFPFYNIL

SEQ ID NO: 8863 - DNA, 400 bp, Homo sapiens
gaattctagcagggacaaagaggtgacaggcccggcaagtagcatggctgcccacgcccccaactgtggcctcctgggcaagccacaccacccacttccataactctgtgcccaccctttctgcctgggggcaggagagacagaaacatgggagggcttcatctcaaaggcctttgagcagttagtcgggggaggggtgtctgggcgtccatgagagacatgtataccggtaggggtgccggtgacagggaaagggggttaatttccctgcacttggcaggaaagaaccagttatgtcctgtaaagccctcacgtaggcaacgactcctggatgttctgattaaccctctatgtgtgtttttttaccctgtattgggaaacaatttttaccctctattgg

SEQ ID NO: 8864 - protein, 63 aa, Homo sapiens
MRDMYTGRGAGDRERGLISLHLAGKNQLCPVKPSRRQRLLDVLINPLCVFFYPVLGNNFYPLL

SEQ ID NO: 8865 - DNA, 524 bp, Homo sapiens
ggatccccccttttaactattcttttgtttaactttaaattgcatcatttcctcccttactttttttccgtctaactcctcccatacacccccttgcctcttccagaaattatgattgttaaagacttttaattcccttgtggagccatgtgtggttatatgcacatgggtgcaggggcccaaggaagccaaaagggttggatctcctggagctggagttccaactgggctgcctgaaatgggtgctggggacggaactaggagcctcttcaggagtggcacacatacttaacagctgagccatctccctagcccctaagtcagctcatttctgagcgtttcccatgtccatatgaaatatacatgcatgctccttaactatggtttctgtttatttttgcagtgctggtgaatctaaccctgggctctacccatgctacactccccactgagctacatcccttaccaggaaaagaatgatttttctttccctacacctcaaacatagactgttaagactcgag

SEQ ID NO: 8866 - protein, 61 aa, Homo sapiens
MAQLLSMCATPEEAPSSVPSTHFRQPSWNSSSRRSNPFGFLGPLHPCAYNHTWLHKGIKSL

SEQ ID NO: 8867 - DNA, 355 bp, Homo sapiens
ggtacccatcacagacctaagcaaagggaatgaaaagcattggagaaggctttttggaagaagtgatgtttggttgagttctgaaaaagaaaaggggctgggcaagtggagaaagagtaatgacatttccagcaaagggaatagcatctgaaaagctgaaaagcatgagaaactttaccttagtgaactgcaagctatacagtcctgctatatgatagagtgggaaaacagtagggtaggaggctagagacatcatcaggggcatctgcaaaggggcttggttcttggcagttacaaagaaatcaccgaatgttttaaggcagccaaggcttctcatttcaattttggagagagc

SEQ ID NO: 8868 - protein, 106 aa, Homo sapiens [sequence omitted]

SEQ ID NO: 8869 - DNA, 293 bp, Homo sapiens
accggtattgcctgcctggcgcaaaacctgcgggaagagcgcgaagaggacggtgaaatcaccgaaatcagcgggcagatccttgagcagaccaagcgcgtttcgcgcatcgtgcaatcgctgacgagctttgctcacgcgggcgctcatcagaatctggacgaagcggtgtgcctggccgaagtggcgcaggatgccattgggctgctggccttgaaccggcgcaatttcgaagtacagttcttcaacctgtgcgacccggaccactgggtcgacggcgactcccaacgcgt

SEQ ID NO: 8870 - protein, 50 aa, Homo sapiens
MSARVSKARQRLHDARNALGLLKDLPADFGDFTVLFALFPQVLRQAGNTG

SEQ ID NO: 8871 - DNA, 386 bp, Homo sapiens
  misc_feature (294)..(294): Wherein n may be a, c, g or t
  misc_feature (335)..(335): Wherein n may be a, c, g or t
  misc_feature (354)..(354): Wherein n may be a, c, g or t
agatctttcataacaacatgctaacagttcattgtatctgacgagctcattgttctgcaaactttaaattcctattttgtcacaaagtgagctacatgatgacagctgttagccctctgcttagagccctgtgcctgttgttccactgcagggggatcccacctaaaggtcactgggtgcccaagagcgaccacttccttttggagcctagaacatttcagccctcccagggcttggacattctgtgtgagctccccacatcactgatagtctgatgattaggaaggacaaggncgttctgtcttctttatttggcagatgatatgtgtattatntgttgtaggatggataatntgggacatccatgtccagaatggtgggcagat

SEQ ID NO: 8872 - protein, 59 aa, Homo sapiens
MMTAVSPLLRALCLLFHCRGIPPKGHWVPKSDHFLLEPRTFQPSQGLDILCELPTSLIV

SEQ ID NO: 8873 - DNA, 368 bp, Homo sapiens
ggatttagcctccaaaaagattaccaaagagttccaaatgactttattaatcccttgtaaaatcaattgaaataaagtctaatttctcgtaaaatagtagttaagaataaaaataaaggatattatatgcttcctgtatcagatgtatcgcttcgttttagcgatcgtaaactttttgatgatgttaacattgccttcacgccaggtaatacttatggtcttatcggtgctaatggtgctggtaaatctacttttttgaaaattttagctggtgatatcgaaccaacaacaggacacatctctcttggtcctgatgaacgtctttctgtccttcgtcagaaccactttgactatgaagaagaacgcgt

SEQ ID NO: 8874 - protein, 80 aa, Homo sapiens
MLPVSDVSLRFSDRKLFDDVNIAFTPGNTYGLIGANGAGKSTFLKILAGDIEPTTGHISLGPDERLSVLRQNHFDYEEER

SEQ ID NO: 8875 - DNA, 178 bp, Homo sapiens
tgatcggccggcagtccagccggtactggccagcgcatggtcgcacccggcagcacataccccatcaagccttccaccagcggacgaggttggccgccctgcttgaatgtggcatcggtcaagcgcgcgtgcacggcgccctggttgcgcatttcgacggtattgcgcccgcccaccg

SEQ ID NO: 8876 - protein, 50 aa, Homo sapiens
MRNQGAVHARLTDATFKQGGQPRPLVEGLMGYVLPGATMRWPVPAGLPAD

SEQ ID NO: 8877 - DNA, 294 bp, Homo sapiens
ggatccctgctcaacaatgcgatgaagggtggtgtggatgatgaagtgacactctctgcctatatcaccattgctctgctggagatgcccctgcctgtcactcacagtgttgttcgtaatgctctattctgcctggaaacggcctgggcctccatctcaaacagccaagaaagtcatgtctacacaaaagcactgctggcctatgcctttgccctggcaggaaacagagccaagcgaagcgaggtgcttgaatccctaaacaaagacgctgtgaatgaagaggaatcagtgcac

SEQ ID NO: 8878 - protein, 98 aa, Homo sapiens
GSLLNNAMKGGVDDEVTLSAYITIALLEMPLPVTHSVVRNALFCLETAWASISNSQESHVYTKALLAYAFALAGNRAKRSEVLESLNKDAVNEEESVH

SEQ ID NO: 8879 - DNA, 288 bp, Homo sapiens
  misc_feature (15)..(15): Wherein n may be a, c, g or t
  misc_feature (250)..(250): Wherein n may be a, c, g or t
  misc_feature (265)..(265): Wherein n may be a, c, g or t
  misc_feature (275)..(275): Wherein n may be a, c, g or t
cctaggcttggatcnaacagccctccatcttttaagttataacatcacaaggagacatttcaagaggaaaccatgcccagtcagacctgcagtaccagagagagggctgcttctgccctttgggaatttgaaaaatatcttcctttttgctgaaaatgcttagtgacagacaaaaatatccccacatagtttttcctgatcggtggacaggggcgacattgaaagtgggcaggggctgagatggagctanttgtacctctggccnagggaattangggtacttgtaca

SEQ ID NO: 8880 - protein, 51 aa, Homo sapiens
MWGYFCLSLSIFSKKEDIFQIPKGQKQPSLWYCRSDWAWFPLEMSPCDVIT

SEQ ID NO: 8881 - DNA, 349 bp, Homo sapiens
acgcgtgtaggtctccctgttctttgtcagcccacatacccaccagagcatgctgtgtggtccacattctttcaggagttttcttctcctccctcccccacgtgccaccatggaggccagcaggtttctcagtgactttctgcatggcaggcttttttcttgtttcctgcacacaaagaatgacttcagcatttcagctgcagggtctcctactagactgcgccttcagcatttttttaatttcttagtgttacataaaaaaaagcttataaaataattgggtgcatcttcaaatctataatacagtaatcttatttgcaaatttaaaaaaaaatgagggattagttca

SEQ ID NO: 8882 - protein, 75 aa, Homo sapiens [sequence omitted]

SEQ ID NO: 8883 - DNA, 303 bp, Homo sapiens
  misc_feature (1)..(1): Wherein n may be a, c, g or t
  misc_feature (2)..(2): Wherein n may be a, c, g or t
nnaagctttgctaaatttagcgccgcggatatctggcgcgagccacttgatgaggggcagaaaaaagagcttgcgcactacctaaacaccgtggcttataatgattttatcgtaagcgaaatttataaaattttcgcagacgacaacacgctgatagtctatttcagcgaccacgcccagagcctttatcaataccgcggcaagctaatccacggcggcatcaaccgcttcacgctcgaaatcccgctgattttcatggcgtcggataagtttaaagaacaaaacgcggatctttggacgcgt

SEQ ID NO: 8884 - protein, 101 aa, Homo sapiens
  misc_feature (1)..(1): Wherein Xaa may be any naturally occuring amino acid
XSFAKFSAADIWREPLDEGQKKELAHYLNTVAYNDFIVSEIYKIFADDNTLIVYFSDHAQSLYQYRGKLIHGGINRFTLEIPLIFMASDKFKEQNADLWTR

SEQ ID NO: 8885 - DNA, 600 bp, Homo sapiens
ggatccaagattattttgaaaagcgtagtcctgtatggattaaatggattcgatgaattaaataataaactgaaagccatttggacgccggatattaccaaaaagcagctgcctggcgttttggaaggcctggctcctgtcagatcgtttatggcgattgggtcaggggtgaagaccctagtcacagtactaatgtcagaatacaggcaagaagggcatttgggaaggagtctgaaaaagggtggcaatgtcttcttgaaaacgacaacgggagattttgtgaaattgggagttaaattaacttcagggacacaggcgatattggagaacaccgaggaactattcggtggtgttggttccaatggcagggtgtacgatgcatcgaaatttggctccgctgatggtgcagccagtgatactgcagctgtattagacttggatactttattcgaggaggatcagttagttggtagtaaatattccaggataagagatcatgagcccccggcagtagtcatcgatatgtcttcaccgggggatcacaacgaacccacaatagtgagtctgtacgcagatcagcccctcgacctgcccccgggt

SEQ ID NO: 8886 - protein, 200 aa, Homo sapiens
GSKIILKSVVLYGLNGFDELNNKLKAIWTPDITKKQLPGVLEGLAPVRSFMAIGSGVKTLVTVLMSEYRQEGHLGRSLKKGGNVFLKTTTGDFVKLGVKLTSGTQAILENTEELFGGVGSNGRVYDASKFGSADGAASDTAAVLDLDTLFEEDQLVGSKYSRIRDHEPPAVVIDMSSPGDHNEPTIVSLYADQPLDLPPG

SEQ ID NO: 8887 - DNA, 244 bp, Homo sapiens
  misc_feature (243)..(243): Wherein n may be a, c, g or t
  misc_feature (244)..(244): Wherein n may be a, c, g or t
gccggcctgctgtgaggacgcagcggggcaggtctctccctctgtgccatccgcagccctgctcagggacagaaaggtctcactcacgagggtgggctctcgtgggctccttgaacttgaggggtgggggggggaattcccgcagctacaggagctgttgctggcaggtgggaggggccaccaccccgcgccttccaggctcccatccccgcttacgggggtcacaggcacaggcatcgcccnn

SEQ ID NO: 8888 - protein, 79 aa, Homo sapiens [sequence omitted]

SEQ ID NO: 8889 - DNA, 238 bp, Homo sapiens
  misc_feature (12)..(12): Wherein n may be a, c, g or t
  misc_feature (19)..(19): Wherein n may be a, c, g or t
  misc_feature (217)..(217): Wherein n may be a, c, g or t
gtgcacgtgcanatgacanagcagatggagtaaaaagttaacaaaaggtatgtgggtattgtttgtattcttattcttgcaacttaagtttgaaattatttccaaaaagaagtttattttggacactcccagcattagagcagtccacttagatttctctacatgtaaaatgaaagagttgaacctagatgtgtctgaagactccattctctcctanattatattaggagtgtgatca

SEQ ID NO: 8890 - protein, 69 aa, Homo sapiens
  misc_feature (66)..(66): Wherein Xaa may be any naturally occuring amino acid
MESSDTSRFNSFILHVEKSKWTALMLGVSKINFFLEIISNLSCKNKNTNNTHIPFVNFLLHLLCHXHVH

SEQ ID NO: 8891 - DNA, 520 bp, Homo sapiens
gtcgacaattgaaccctccttggtcggcgtggccccagatccatgatccacgctactcaagtacgagcaagaaccatatattggttcgcgacatcccagatgatggaacgattcgctcaccagagttgtccacagatttcccgaacaacccttccgcttacggtatctcatgcgttgtccttgggtacatgacgacgacatcctcgcctataccactcaactcggcactggtagaccattccgggatctttttggaacttgatcgggattggtggcctgacgaactatgtatcgtctcatcggcaccgacactgagccgcaacggagatgactcacaagctcgttacgaggcggtaaggctcacccgcgcagcccacatcatcatcgtggagacgatggctggacgacgacctatgagccagctcgtcaaggccagtagcactcgtgcagttgggacgatgagacgttggcctcgcggcccgggctggagccgtatgctcctcgttggtgagccacgcgt

SEQ ID NO: 8892 - protein, 110 aa, Homo sapiens
MTTTSSPIPLNSALVDHSGIFLELDRDWWPDELCIVSSAPTLSRNGDDSQARYEAVRLTRAAHIIIVETMAGRRPMSQLVKASSTRAVGTMRRWPRGPGWSRMLLVGEPR

SEQ ID NO: 8893 - DNA, 409 bp, Homo sapiens
  misc_feature (1)..(1): Wherein n may be a, c, g or t
  misc_feature (2)..(2): Wherein n may be a, c, g or t
  misc_feature (3)..(3): Wherein n may be a, c, g or t
  misc_feature (14)..(14): Wherein n may be a, c, g or t
  misc_feature (18)..(18): Wherein n may be a, c, g or t
  misc_feature (24)..(24): Wherein n may be a, c, g or t
  misc_feature (106)..(106): Wherein n may be a, c, g or t
nnncgactgcacanatanatacanacatcccctggacatataaaactatacttaacctccctgacaataagagaaatgtacagtgaaactatagtgagattttatntttcacctcttacattgggaaaaattcaaaaatttgacaagttttcgaaagtttgacaacacagttggagagtttgtggagagacagacatttacatactctgcaaaaccatgaaacccttagggaaagcagtctgacaatatcttttaaattttcaaatatacatactctttgagccagaaaggcctcctctaggaagctatcctgcagatgtaactacatatgtataaaatgacacacatacaagagaatacttcagagcattgttcagaatagcaaaagattagaaacatccatggatcc

SEQ ID NO: 8894 - protein, 53 aa, Homo sapiens
  misc_feature (1)..(1): Wherein Xaa may be any naturally occuring amino acid
  misc_feature (5)..(5): Wherein Xaa may be any naturally occuring amino acid
  misc_feature (6)..(6): Wherein Xaa may be any naturally occuring amino acid
  misc_feature (8)..(8): Wherein Xaa may be any naturally occuring amino acid
  misc_feature (36)..(36): Wherein Xaa may be any naturally occuring amino acid
XRLHXXIXTSPGHIKLYLTSLTIREMYSETIVRFYXSPLTLGKIQKFDKFSKV

SEQ ID NO: 8895 - DNA, 174 bp, Homo sapiens
cgcgtgctggagcatcacagctggccggggaacacgcgggagttggagaacgtgattcactttgccctgttggtcagcagtggcgacgagattttgccggagcatttgaacctgccgctgccgtcggtgacgcagatcgaacaccaggcgcggcagatcctcagcagcggtacc

SEQ ID NO: 8896 - protein, 58 aa, Homo sapiens
RVLEHHSWPGNTRELENVIHFALLVSSGDEILPEHLNLPLPSVTQIEHQARQILSSGT

SEQ ID NO: 8897 - DNA, 360 bp, Homo sapiens
aatttggtgattaacctttacagcgaagtcggagaatattattccgcattaggatacgagagtatgcatgttcccttgcaccgcatttctaaattagatgaacttactgagagatactgtggagaagatgatgaccatgatggtaagtacttgggatttgatgattacaggggtttagtaggactacatgagacacagttcaaagaaagcttattaagtttacacaaagaaaacccagagaagtttgtttttaccgttgcgccagactttgacattttcacatggtttcagtatcgtgatctttttatcatgaataaatcaggaagaaaagcccagcaaaatctgttttttggatacgcg

SEQ ID NO: 8898 - protein, 120 aa, Homo sapiens
NLVINLYSEVGEYYSALGYESMHVPLHRISKLDELTERYCGEDDDHDGKYLGFDDYRGLVGLHETQFKESLLSLHKENPEKFVFTVAPDFDIFTWFQYRDLFIMNKSGRKAQQNLFFGYA

SEQ ID NO: 8899 - DNA, 311 bp, Homo sapiens
agatcttcacgctggccaagtccaacgaccggatgatctattactacttcggcagcaaggaaaagctgttcatcagcgtgctggagcatatctacgccagcttcaaccaggccgaagccaagctgcgcatcgacctcggcgacccgaaacaggccctgcgtgagctggtggcgttcatctgggactattacgtgcgccaccccgaatttgtcaccatcctcgccaccgaaaaccttcaccagggccagcacgcgcgcaagtcgcagaacctcaaggcgctgtccggcgaagcggtcggcgtgctgcggccg

SEQ ID NO: 8900 - protein, 93 aa, Homo sapiens
MIYYYFGSKEKLFISVLEHIYASFNQAEAKLRIDLGDPKQALRELVAFIWDYYVRHPEFVTILATENLHQGQHARKSQNLKALSGEAVGVLRP

SEQ ID NO: 8901 - DNA, 363 bp, Homo sapiens
gcgttcatcgcgaatgtgtggcagcgcaacctgcctaccaagttcttacagcgttcggacatcatgtcttggcaagacggccgtatcgctttcgctaacggaaccgtggcaacctcgtcgaagaagtccatctcgggtcatgagattcccaccgcaagaaccatcacctttgacggtgccacggtcttcaaggaaggcgggtcctacctgctcccatggtctaacggtggcagcgatcgcctgtactactggaatccgggcaatggctcagcaacctggaaactcacgaattcgtgggcggcacagaaatcggtgactctgtttatgcttaccgacaccggccgtgtcaaggttgccgagatc

SEQ ID NO: 8902 - protein, 121 aa, Homo sapiens
AFIANVWQRNLPTKFLQRSDIMSWQDGRIAFANGTVATSSKKSISGHEIPTARTITFDGATVFKEGGSYLLPWSNGGSDRLYYWNPGNGSATWKLTNSWAAQKSVTLFMLTDTGRVKVAEI

SEQ ID NO: 8903 - DNA, 455 bp, Homo sapiens
  misc_feature (430)..(430): Wherein n may be a, c, g or t
tgatcagttggtcctcactgtcttcaaccaatgggaggcactgtggaaagactgcagggtaaaaagcagtgaaatccagggcatttccccccccaagtcgctctatttccacaggatctctgtcagcagctttatcttctttatgacttcagctggagcacaacaggtctgctgtggtttcaccttctgcctgttgacttgggcccctagctctggtaacttctcctcttttctttttccctttggcttaggggtagtagtgacttctgggttattcagtgtcttctgttttgcttcttagctctcccctcacctgtgtaatcaggtttctggtctaaactctgtgtactcatgtggtttgtgttttcctgactggcctttgatgtacttcctattactgaatgatacttgctgtgtagcccggcctctntgggagagtgacataaaatccacgt

SEQ ID NO: 8904 - protein, 52 aa, Homo sapiens
MTSAGAQQVCCGFTFCLLTWAPSSGNFSSFLFPFGLGVVVTSGLFSVFCFAS

SEQ ID NO: 8905 - DNA, 405 bp, Homo sapiens
  misc_feature (1)..(1): Wherein n may be a, c, g or t
ngtttgcatatctggcctgcacacatgccatgttattaccttttgtgggtgtgcttgcatgaaggaatctgggcatgcctagaaaatatacatcacaattaaagggcctgggagggtgtttctttgctcggggacactgaaggaattgtgtgttgtgcatctgtgttttgacttcgactcatcacgtgaggtcagctgtgaagttttccacttgtggtgtcatgtcagcactcaaaaagtttcagattttcaagcattttggatttggggttttcatattaaggatgcccaacctctttattcagttgtcttatggggaattgagtccagtgaagggtatcaaggaatcataaaatgttgagcagggaagtagttcagaaatttccaaactcaaagtcctctaga

SEQ ID NO: 8906 - protein, 53 aa, Homo sapiens
MHNTQFLQCPRAKKHPPRPFNCDVYFLGMPRFLHASTPTKGNNMACVQARYAN

SEQ ID NO: 8907 - DNA, 312 bp, Homo sapiens
acgcgtcgcataatgcaaaaagatcgctgcccccgactcagcaccatgacgcgccggcgagccatagttgaaatccagtacggctgcttgccggtactgacggcccacgtagctcgttgtccgacttcgacaacgcgcgacagtcctgacgccaccggttgtaatcaggggcagtgggatcaccgatccaccacgagcacgaattgatccgccaatacggcaacttcgtccccggatcaccagcaccgaaagcaaagacgaccccgtagacacctgatggggcgtcatatcaccctgaatacactgagatct

SEQ ID NO: 8908 - protein, 96 aa, Homo sapiens
MTPHQVSTGSSLLSVLVIRGRSCRIGGSIRARGGSVIPLPLITTGGVRTVARCRSRTTSYVGRQYRQAAVLDFNYGSPARHGAESGAAIFLHYATR

SEQ ID NO: 8909 - DNA, 192 bp, Homo sapiens
atcatcatcgacgagtcgctcaacggcatcgacatcgaggcccagatgacgatcgaggacgcccttttcaaccgcatccggcaaggcggtacccagatcatctgcagccacgatttcgccatgctggaccgctgcgcaacccacgtcgccatgctcgactatgggaatatggtcgagttctccgccgtcgac

SEQ ID NO: 8910 - protein, 64 aa, Homo sapiens
IIIDESLNGIDIEAQMTIEDALFNRIRQGGTQIICSHDFAMLDRCATHVAMLDYGNMVEFSAVD

SEQ ID NO: 8911 - DNA, 343 bp, Homo sapiens
tgatcagaagctcatgttccaaaggattccctccaagggcctcctgaacttggcttttctgcctctccttacccgcctttgcccctctgggggaagaggtagcaagcttagaagcctcttgcccttgggtttgggccaggtgggttggggcttgtgccctggtttaacatcagctccttggcagtcaggccaggccagggtggcccaggcacagcgtgcacaagagcagggagtggcacctggtctctaagttactctgcagacgcatacatggaaacggccagtaagaaaggatgcgtgatttatttccccaagcctcatttaagaagtttgaggaggccgg

SEQ ID NO: 8912 - protein, 78 aa, Homo sapiens [sequence omitted]

SEQ ID NO: 8913 - DNA, 292 bp, Homo sapiens
acgcgtgtcgccttcggtctgatgtcgagtgatacgcgcaatgataatcaggctccacaatggtatctcgatcgacagaccacccacccgggtgttcaatgagttcaagtatcttggagcgataggcgtaccggaggttggtggtcgaagtggcacctttgggcaactcacgacaacaatcccttggcaggatttgtcaggcggacccatccatcaagagattcgtgacggaagtgggcgctattggaaccgctattcaactaataacacaacttggtccgcgtggacggag

SEQ ID NO: 8914 - protein, 84 aa, Homo sapiens
MIIRLHNGISIDRPPTRVFNEFKYLGAIGVPEVGGRSGTFGQLTTTIPWQDLSGGPIHQEIRDGSGRYWNRYSTNNTTWSAWTE

SEQ ID NO: 8915 - DNA, 314 bp, Homo sapiens
gcgtggacgcgctattacaagcaggacgagaattcgcccaatgcgctggtgagctactacaccaagggcgcgctggtggcgctggggctggacctgctgatccggcaggagtcggcgggcacgcattcgctcgatgatgtgatgcgcctgctgtggcagcgctatgggcgcgatttctatcgcggcaaggcgcaggggctggcggaagatgggctgccggcgctgatcaaggaggcgacggacgtggacgcgcggcgcttcattgcgcggcatgcctatggaacggggggatgtgccggtggcggagctgctgg

SEQ ID NO: 8916 - protein, 104 aa, Homo sapiens
AWTRYYKQDENSPNALVSYYTKGALVALGLDLLIRQESAGTHSLDDVMRLLWQRYGRDFYRGKAQGLAEDGLPALIKEATDVDARRFIARHAYGTGGCAGGGAA

SEQ ID NO: 8917 - DNA, 471 bp, Homo sapiens
  misc_feature (1)..(1): Wherein n may be a, c, g or t
  misc_feature (2)..(2): Wherein n may be a, c, g or t
nnacgcgtcagagagatctgtgtgtcgggaggggtgcccctcatcattgatgaccgcgtacatctcgttgccgaaattggggccgatggtgtccatgttgggcagtctgacatgccggtcgaccaggcccgtgcgattctgggcgacgatctactcatcggcttgtccgctcagactcccgcccatgtggaggccgccctgtcccaggggcgtgacatcgtcgactatctgggagttggggccctgcatggtactggaaccaaacctgaggctggggagctcggcctggctgagattcgtgatgtcgtcaacgccagcccgtggccggtgtgcgtcatcggtggggtgagcgcatccgatgctcaagacgtagcccgggtgggatgtgacggcctgagcgtcgtctcggcgatttgccggagtaccgaccccaagtccagtgcacgggaacttgcggaggcgtggcgtacg

SEQ ID NO: 8918 - protein, 157 aa, Homo sapiens
  misc_feature (1)..(1): Wherein Xaa may be any naturally occuring amino acid
XRVREICVSGGVPLIIDDRVHLVAEIGADGVHVGQSDMPVDQARAILGDDLLIGLSAQTPAHVEAALSQGRDIVDYLGVGALHGTGTKPEAGELGLAEIRDVVNASPWPVCVIGGVSASDAQDVARVGCDGLSVVSAICRSTDPKSSARELAEAWRT

SEQ ID NO: 8919 - DNA, 311 bp, Homo sapiens
gaattccatgaggtgcgtgattccatgaagtggcatgtctgctttagaaagtatcagggttatcataatagatgtcaaaggaccaagaaatagagactttaatgaagccagtcaactttcaagatgccgacagccattcaggagcctaaataaagatctctgtccaactgtttccactgctaaagatcaactgtatactgtaagcccagtgacagtagaaaataccagagtcctgagaaaaactccagagaatctcctctatgtcagtgattctcaaactttcaggtgaataagaatcacctggtaagctt

SEQ ID NO: 8920 - protein, 84 aa, Homo sapiens [sequence omitted]

SEQ ID NO: 8921 - DNA, 366 bp, Homo sapiens
  misc_feature (366)..(366): Wherein n may be a, c, g or t
aagcttgtttttaagcagtgatcagtcttttactctgctgttttatggctgtcatcaactttatttcttcatttgaagcgtaagatagccatttatgctgattaattgtctcagaagattcacagtggtacagcgacatattatgtttctcaccctgtaaagtctgattagaactgtatattttattagaaaatttcatgtacttaccaaaattataaaattgaataatttgtattttcattctccctaattgttacactagatggtaatgtgaaaagatagttaagtactacctcatgtatttcctgtttagaaaaatttcaggagaatttagtttgtattttgcaagtatatgaaagctctggn

SEQ ID NO: 8922 - protein, 76 aa, Homo sapiens [sequence omitted]

SEQ ID NO: 8923 - DNA, 633 bp, Homo sapiens
  misc_feature (1)..(1): Wherein n may be a, c, g or t
ncggccgatgaaatttgtttcacggtataacaaacaacttcaaaggtgattgtacctagagtcttttaagtatgaaatgacagaaattagatacctattttgttttgttgttttcttccagcctcatgacctcaataaacttagttagggtgttattcgtgtaaaaaatatagaaagcccctaatgtctgcttcaactcattcgcataaaaggaagaatagtcatttatttccgcaaaggaaaagttcaaactcttccatggataagccattctttcctaataacgatagtgtagctaacacagatcctcaaagtaacgagaatggacatacaattaacgagattagaccgacagaagctacaatagatgttacagatgttcctcaaaccccctttctccaggaacaatactcaatgcgtcccagacgagaaagcttccagtttaatgatattgaaaaccagcatcacacgcattcctttttcagtgtaaacaaatttaatcgccgatggggagaatggtctctgcccgagaaaagatcttatgtcttagtctttacattaatagcactatcagttttagttctacttgttattctaataccttcaaaacttctacctaccaaaatcacgcgt

SEQ ID NO: 8924 - protein, 150 aa, Homo sapiens
MSASTHSHKRKNSHLFPQRKSSNSSMDKPFFPNNDSVANTDPQSNENGHTINEIRPTEATIDVTDVPQTPFLQEQYSMRPRRESFQFNDIENQHHTHSFFSVNKFNRRWGEWSLPEKRSYVLVFTLIALSVLVLLVILIPSKLLPTKITR

SEQ ID NO: 8925 - DNA, 282 bp, Homo sapiens
tatcagaccacagacgaccagtgtgtctataacttcacccatctaggagtccagagagagaatgggaccttatccaagtgtgcaggagcagtgaaaatctttgcccatttgatagtgctgaagaaacatgggaccttcatgcctgcctttaacctgacagatgagaaccgggggctgtccttctatgctaaaaagccagacttgtccccagagctgcggaaaatattccagcaggctgtcaaagatgtgggcatggatgaatcagaaatcgtatttgtcgac

SEQ ID NO: 8926 - protein, 94 aa, Homo sapiens
YQTTDDQCVYNFTHLGVQRENGTLSKCAGAVKIFAHLIVLKKHGTFMPAFNLTDENRGLSFYAKKPDLSPELRKIFQQAVKDVGMDESEIVFVD

SEQ ID NO: 8927 - DNA, 214 bp, Homo sapiens
tagtgtcttggtcattaaggcctctcatgggtcataagaggggtacccatcccttccagcttttgcaaggaggaggtcctgaaataatttatcagtggtctctgccatttagcagccgcaatgaactctgggggcagctggcagaggccctgcatttggccatgagcacatgccctcaaggctgttaataaagaagtaggcaggtacagaattc

SEQ ID NO: 8928 - protein, 53 aa, Homo sapiens
MGHKRGTHPFQLLQGGGPEIIYQWSLPFSSRNELWGQLAEALHLAMSTCPQGC

SEQ ID NO: 8929 - DNA, 392 bp, Homo sapiens
  misc_feature (1)..(1): Wherein n may be a, c, g or t
  misc_feature (2)..(2): Wherein n may be a, c, g or t
  misc_feature (3)..(3): Wherein n may be a, c, g or t
  misc_feature (388)..(388): Wherein n may be a, c, g or t
  misc_feature (389)..(389): Wherein n may be a, c, g or t
  misc_feature (390)..(390): Wherein n may be a, c, g or t
  misc_feature (391)..(391): Wherein n may be a, c, g or t
  misc_feature (392)..(392): Wherein n may be a, c, g or t
nnnattacctacgttcgcaccctgtcaggattcgcctacaccgcatttgtcgtggatgtcttcagccgaaaaattgttggtgttgctacacgctcgacgatgcgtaccgatgcgctgcccatggaggctttggagcatgcgttaacgactgcagggcgaattcatggaaaccagttaattcaccatagcgatcggggcagccagtacgtgtcactgaagtattccaccgcgttagcggaatccggaatccgtccgagtgtgggaacagtcggcgattcttatgacaatgctctagccgaaacagtcaacggtctctacaaggcggaactgattcatgcccaaggtccgtggacgtcggtcggagaagtcgaattggccaccttgcggnnnnn

SEQ ID NO: 8930 - protein, 130 aa, Homo sapiens
  misc_feature (1)..(1): Wherein Xaa may be any naturally occuring amino acid
  misc_feature (130)..(130): Wherein Xaa may be any naturally occuring amino acid
XITYVRTLSGFAYTAFVVDVFSRKIVGVATRSTMRTDALPMEALEHALTTAGRIHGNQLIHHSDRGSQYVSLKYSTALAESGIRPSVGTVGDSYDNALAETVNGLYKAELIHAQGPWTSVGEVELATLRX

SEQ ID NO: 8931 - DNA, 444 bp, Homo sapiens
gaattctgtagttatttgacattttaaatgattattttccttaattttagctaactctagaattagtcaaaaataatcaattaagctccaagttagtgccagtgtgtgaaagaattaatctaaaactagttatatgccttatagaacatccaataatttagagctaaatggtttatttttcaaggtaagtgttatagggggccagagaggaaaaatactgaaagttggaataggaaagctttattcagaaaacgggattgttactgaccataatttaagtgttctgagagagattggagatatttaagctaaagagagttgtttctaaacacaagtgaatgagctatgattataactgaacttaccaaaaactggagttgcaaagtttccattatgctttgccagtctctaagcaagaatactatttcctaatgttcaagatct

SEQ ID NO: 8932 - protein, 57 aa, Homo sapiens [sequence omitted]

SEQ ID NO: 8933 - DNA, 184 bp, Homo sapiens
  misc_feature (1)..(1): Wherein n may be a, c, g or t
ncggccgccaccatcggctacatccaatcgtccggcatgccgttcgcgccgctggcctatgcgaccgccatcgccgtcgaactgggcggcggcctgctgctggtgttcggctaccagacgcgcatcgtcgccgccctgatggccgcgttctccgtcgtcaccggcctcgccttccaccacgcgt

SEQ ID NO: 8934 - protein, 61 aa, Homo sapiens
  misc_feature (1)..(1): Wherein Xaa may be any naturally occuring amino acid
XAATIGYIQSSGMPFAPLAYATAIAVELGGGLLLVFGYQTRIVAALMAAFSVVTGLAFHHA

SEQ ID NO: 8935 - DNA, 358 bp, Homo sapiens
gccaatgctgggtagggggaaatgtgggccacatggccctccaaagaagctgcaagtactccccagaaacacatgtctcatacacatgtccccaaatcttctgggacctccaatttgtgaaatttataacctcaggggagttactgtagagaataataaagccatattaacaagttcatgctaggcctttagctagttttacaccttagatcccataaacggtgggctataaaaggacagcagtgcatacactcatgtaccgcagttacaaacatatagaaacactcatgccgacagcagaaatgaaaccagacagatgaaaaggaggggaaggggaaggaggaaccaaagtcccggg

SEQ ID NO: 8936 - protein, 59 aa, Homo sapiens [sequence omitted]

SEQ ID NO: 8937 - DNA, 329 bp, Homo sapiens
gctagccagcttgagtttagaataagcaatatgtatctttacatgctcagttcagcaagatgctatcagtgtgacaagaagatgggaactatacgcctagggaagtgacaggattacaaggactgggacaaatgctcaggcagtgtgtggagaatggcatcctccaccacacctaaactccctccctctccactgtcacacagttcacttcggtagttatttgttggtgaaatgcacacaggatgcatactgtgtcctctggcatccatatagcaatgggctcctccagaacaatccataaccatggtggcttcacactgcctgcctgt

SEQ ID NO: 8938 - protein, 63 aa, Homo sapiens [sequence omitted]

SEQ ID NO: 8939 - DNA, 306 bp, Homo sapiens
gccataacgaattctactccattatcgtcggcagcattcggaattcgatcgcctttgcagaaaataagaacgaggcgttattccgatgaaagtttaggaaaattcatgaaatcaacaaataattacattcaagaacatttgataccaaaagatttgaatgaagcaactcttcaagatgctagaagaataatgattaatattttcagtatttttaagagaccgaatagttacttcatcattcctcacaatataaactcgaatttacaatgggtttcgcaagattttagaaatattatgaaaccgatt

SEQ ID NO: 8940 - protein, 102 aa, Homo sapiens
AITNSTPLSSAAFGIRSPLQKIRTRRYSDESLGKFMKSTNNYIQEHLIPKDLNEATLQDARRIMINIFSIFKRPNSYFIIPHNINSNLQWVSQDFRNIMKPI

SEQ ID NO: 8941 - DNA, 186 bp, Homo sapiens
aagggcggccccttcggtggcaaggtgctcatcccgacgaagcagcacgttcgtacgctgaacgccgcccgcctcgccaccgacgtgtcgaacacgccgaccgtcgtcatcgcccgtacggacgccgaggccgcgacgctcatcacgtccgacgtcgacgagcgcgaccagcagttcctcaccggt

SEQ ID NO: 8942 - protein, 62 aa, Homo sapiens
KGGPFGGKVLIPTKQHVRTLNAARLATDVSNTPTVVIARTDAEAATLITSDVDERDQQFLTG

SEQ ID NO: 8943 - DNA, 405 bp, Homo sapiens
gtgcacggtctgagccgtgaccataaccgcaccgtggttatggtgctgcatgacctaaatttggcgttgcggtattccgacaacctggtggtcatgcgtgacggcgcgctcattgcatcgggcgcgccgtcagaggtgatctcggctgaactgctggaaaaagtattcaaccttcatgccgttgttgtggaggatcccatcaccggcgggccgatgattgtgccactccgcaacgccgacaaagcaaaagctgactaggacttttctgacttcgtgtaggaatccaagtccacctgcggggtaggctgcagctcgtcggtggcggggttggccactgacgggtttttgggatctacgtgggagtcgtcgccgctgtccacgtagggtattttccggtccagcacg

SEQ ID NO: 8944 - protein, 85 aa, Homo sapiens
VHGLSRDHNRTVVMVLHDLNLALRYSDNLVVMRDGALIASGAPSEVISAELLEKVFNLHAVVVEDPITGGPMIVPLRNADKAKAD

SEQ ID NO: 8945 - DNA, 399 bp, Homo sapiens
  misc_feature (1)..(1): Wherein n may be a, c, g or t
  misc_feature (2)..(2): Wherein n may be a, c, g or t
  misc_feature (10)..(10): Wherein n may be a, c, g or t
  misc_feature (12)..(12): Wherein n may be a, c, g or t
  misc_feature (14)..(14): Wherein n may be a, c, g or t
  misc_feature (399)..(399): Wherein n may be a, c, g or t
nnttttcttntntngtagagagaatctcattatgttgcccgggttggtctcgaactcatggactcaaaggatcctgccacctcagtctccgaaattgctgggattataagtctgagctgctgcacccaaccatttattaagtgccaaattattgttgtttgctagaatttccaccatatggtctttagaacactcatcgtgaaagataggctgggcgtggtgtttcatgcctgtaatctcagcaatatgggaggccgaggtgggaggaacgcttcagcccatgagtttgagaagagcctgggcaacgtggtgaaaccccatctccacagaaaaattttaaaaaattagtcaggtgtggtggcacacacctgtagtcctatctactctggaggctgagcn

SEQ ID NO: 8946 - protein, 56 aa, Homo sapiens
MVFRTLIVKDRLGVVFHACNLSNMGGRGGRNASAHEFEKSLGNVVKPHLHRKILKN

SEQ ID NO: 8947 - DNA, 382 bp, Homo sapiens
  misc_feature (1)..(1): Wherein n may be a, c, g or t
ngcgcgccagggggtggccaggtgctctgcaaggcagagctgctggtgcttgggggggacaatgagccggactcaaagaagcaaagccaccggaggaagctgcactccttctatgaggtcaaggaggagattggaaggggcgtgtttggcttcgtaaaaagagtgcagcacaaaggaaacaagatcttgtgcgctgccaagttcatccccctacggagcagaactcgggcccaggcatacagggagcgagacatcctggccgcgctgagccacccgctggtcacggggctgctggaccagtttgagacccgcaagaccctcatcctcatcctggagctgtgctcatccgaggagctgctggaccgcctgtactctgcatgga

SEQ ID NO: 8948 - protein, 127 aa, Homo sapiens
  misc_feature (1)..(1): Wherein Xaa may be any naturally occuring amino acid
XAPGGGQVLCKAELLVLGGDNEPDSKKQSHRRKLHSFYEVKEEIGRGVFGFVKRVQHKGNKILCAAKFIPLRSRTRAQAYRERDILAALSHPLVTGLLDQFETRKTLILILELCSSEELLDRLYSAW

SEQ ID NO: 8949 - DNA, 306 bp, Homo sapiens
tggccaacagacgacagtcattacgctgctgaaaaggctgctttgcaaacctatttgccaaaaattaaagaatccactgttgctggtttcttggttggttctgaagccttataccgtaacgatttgactgcctctcaattatcagacaaaattaatgacgtccgtagtgtcgttgctgacatttccgattctgacggaaagtcatactctggtaagcaagtcggtactgtcgattcctggaatgttttggttgctggttacaattctgccgttatcgaagcttccgattttgttatggctaacgcg

SEQ ID NO: 8950 - protein, 102 aa, Homo sapiens
WPTDDSHYAAEKAALQTYLPKIKESTVAGFLVGSEALYRNDLTASQLSDKINDVRSVVADISDSDGKSYSGKQVGTVDSWNVLVAGYNSAVIEASDFVMANA

SEQ ID NO: 8951 - DNA, 394 bp, Homo sapiens
gtgcacaaacatttagtccataatagcgtcagacacattgtgaggctggaagctaatatctgagctcctaacttgtgctagtccctttgtgtatcctttatccagctttatatgtgtatatatatatttatctccatattcctctgattctgagaacagccctgtgagaaaaatattaaatagtttcactttgcacatagggatattgcagctcagaaatgtccaacaacattcctgaggtcatatagctgctggtaaatgacagatcaggattgtaactgaagtcgggggactttgtgaaactagaggccagaagagtagcttgaagtactatctggatatgaatagtaatatctgtaactgcaattgaggcaggagaatcacgagagggaat

SEQ ID NO: 8952 - protein, 61 aa, Homo sapiens [sequence omitted]

SEQ ID NO: 8953 - DNA, 242 bp, Homo sapiens
gaattcctaacatttttaatgcaaaaaaatgtacaaaccttcataaaatgtctgagagaacatgtaacaaaacacatgcgctcactcaggcattatgttctggaaactgtgatcatagtacctaccaatccacagcccctttgagtgacccaaccccactggcaggccctgctcaaagggggccctccttgtgcaggtgtcagaagctcattcctccccaagcaccactccctgggccaggt

SEQ ID NO: 8954 - protein, 65 aa, Homo sapiens
MSERTCNKTHALTQALCSGNCDHSTYQSTAPLSDPTPLAGPAQRGPSLCRCQKLIPPQAPLPGPG

SEQ ID NO: 8955 - DNA, 382 bp, Homo sapiens
  misc_feature (1)..(1): Wherein n may be a, c, g or t
ngccggcacagatgacacgttcacgggtcattcatcaggacgagtgaccctccacccggcagccgccactaggcaagcgccccgtcagccgctacattggcggacttgcgcctgcctttcaggcccatctgctcaccctttttgattagacggaacccgcaaaaccccatcatggacccttcccctggcatcaccctcgcgacactcttcgccgacttcggcatgattctttttgcactgatcctggtactgctcaacggctttttcgttgcggcggaatttgccatggtcaaactgcgctcgacccgggtcgaggccatcgcccacaaaaacggctggcgcgggcagatcctgcgcaccgtacacagccagctcgacgcgt

SEQ ID NO: 8956 - protein, 70 aa, Homo sapiens
MDPSPGITLATLFADFGMILFALILVLLNGFFVAAEFAMVKLRSTRVEAIAHKNGWRGQILRTVHSQLDA

SEQ ID NO: 8957 - DNA, 299 bp, Homo sapiens
gccggcaagtaaagtatgtccagaccggcgtggatacttgacctgtctctcagttctcttttgacccataatcttgagtacaaaacagctagtgctgtgcctgcagctaaaaacagccaggcatggaaagaagtgttgtggctgggtccatcttcagaaactgtagagagaaatatctccattgtcatctttcacagtttggcacagatgtagccaactcagcatgtactctctctccatggggtcctggtgcctccattgcaagtggtcagatgatgtagcaatgaaagaaggaaaca

SEQ ID NO: 8958 - protein, 65 aa, Homo sapiens [sequence omitted]

SEQ ID NO: 8959 - DNA, 403 bp, Homo sapiens
agatctcccagctgtcagttatgcagattataactgatgccagtccgaacatccctggccagactctggggttccacacgggaatcctcgtggtgtggcatggcataacatcagcatagggtcacttctcagatgcagaactattcccactgtaatgtgcagcagtcaggatgacagagttgctaccttcaaactttttcagagcagactattcactgtgaactcatggcgaccagtaagaacagcagggcatctgtgtgggagtgtggttgccctggtttcccgggtgtaccagagattcgctatgtggtgtctggatggctgacttatccagtttctctacaatgaggtagtataggcaacatattttagtcactaatgaaacagagatgtgctgctgaga

SEQ ID NO: 8960 - protein, 56 aa, Homo sapiens
MCSSQDDRVATFKLFQSRLFTVNSWRPVRTAGHLCGSVVALVSRVYQRFAMWCLDG

SEQ ID NO: 8961 - DNA, 393 bp, Homo sapiens
  misc_feature (1)..(1): Wherein n may be a, c, g or t
  misc_feature (2)..(2): Wherein n may be a, c, g or t
nngcccgctggaacataaagataatttactgaaacagtgtgcttaaacgtatttgaaaaccaaggtgaatgtacccttaaagtgctggcagtgaatagcaaaggtccattaaagtgttctggttttataatatcaaaagcatttatagaaatgcccgctgaaattgacattgatgaagctgacgtattagttttatcacaggagttacaaaagacaagtaaactcactttcgaaatcaataaatctttgaaaaaaattgcagctacatccaatcaatccagtcaactcttcactcctattcttgctagaaataatgttttaaccacattacaaagaaatattgaaagtacattgaattccgttgcttcagttaaggatctagcaaacgaagct

SEQ ID NO: 8962 - protein, 81 aa, Homo sapiens
MPAEIDIDEADVLVLSQELQKTSKLTFEINKSLKKIAATSNQSSQLFTPILARNNVLTTLQRNIESTLNSVASVKDLANEA

SEQ ID NO: 8963 - DNA, 246 bp, Homo sapiens
ccggactgtatacctgatgtagagctaagccatggcgtaatgacattggaaattccagcttttggaacgtatgtaataaacaaacagcctccaaataagcaaatttggctggcatcaccattgtccgggcctaacagatttgaccttctcaatggggagtgggtttcgttaagaaatggcacaaagctaacagatatacttactgaagaagttgagaaggccatttctaaaagccaataagtgcac

SEQ ID NO: 8964 - protein, 79 aa, Homo sapiens
PDCIPDVELSHGVMTLEIPAFGTYVINKQPPNKQIWLASPLSGPNRFDLLNGEWVSLRNGTKLTDILTEEVEKAISKSQ

SEQ ID NO: 8965 - DNA, 423 bp, Homo sapiens
cttctgagttggtttcctggtcttggcaaaacaattcctcaattccagagggaacctttaatcatgaagctaattactatcctgctcctctgctccaggctcctgccaagtttagcgcaggaagaaggcgcccaggaattgaactgcaatgatgggactgtatttcaggctgtggatactgctctgaagaaatataacgctgagttagaaagtggcaaccagtttgtgttgtaccgagtgactgagggcactaagaaggatggcgctgaaacattgtattccttcaagtatcaaatcaaggagggcaactgctctgttcagagtggcctcacctggcaggactgtgacttcaagggcgctgaggaagctgctactggcgaatgcacaacaactttggggaagaaagaaaatgaattctccgta

SEQ ID NO: 8966 - protein, 120 aa, Homo sapiens
MKLITILLLCSRLLPSLAQEEGAQELNCNDGTVFQAVDTALKKYNAELESGNQFVLYRVTEGTKKDGAETLYSFKYQIKEGNCSVQSGLTWQDCDFKGAEEAATGECTTTLGKKENEFSV

SEQ ID NO: 8967 - DNA, 285 bp, Homo sapiens
tcccgccgcaaggcctcgtggcgggatcccgaaggcgtcgccatctccgccacgacacgcgacgacgcggccgacctcgcgcgcgcgctccgcgaccagatcgtctccggtgaccgcgagttcgaggacgtcgctgccgagaactccgactgcagctcggccaagcgcggcggtgacctcggttcatttgggaggggtaagctgcagaagccttttgagaaggccgcgtttgctctgaaggtcggggagatcagcgacgtggttgatacagagagcggggtgcac

SEQ ID NO: 8968 - protein, 95 aa, Homo sapiens
SRRKASWRDPEGVAISATTRDDAADLARALRDQIVSGDREFEDVAAENSDCSSAKRGGDLGSFGRGKLQKPFEKAAFALKVGEISDVVDTESGVH

SEQ ID NO: 8969 - DNA, 212 bp, Homo sapiens
  misc_feature (1)..(1): Wherein n may be a, c, g or t
ntggctagtatttctagaatattttctgggagatgttccagaaaattggaaaggttttagggcaaaggtgaagagaacataaagagaggaggtagaaaataacagatttgctgattactgactgagcttcagagggcataaaggaaggcttgggggattggggaagaggagtgggatatggggtcatatataagggtccgaagagccctata

SEQ ID NO: 8970 - protein, 57 aa, Homo sapiens [sequence omitted]

SEQ ID NO: 8971 - DNA, 279 bp, Homo sapiens
accgcggcgatcgtggggcccaccggcgcgggcaagaccaccatggtcaacctgctcatgcgcttttatgacatcgattcaggccgcattcttatcgatggccacgaaaccgcccacatgccccgcaccgccctgcgctcccaggtgggcatggtgctaccaaaatccgtcctttttgaaggcaccatcatggacaatatccgctacggccggctcgatgccacggacgatgaggttatcgccgcggccaaggccacctacgtcgatcgcttcgtgcac

SEQ ID NO: 8972 - protein, 93 aa, Homo sapiens
TAAIVGPTGAGKTTMVNLLMRFYDIDSGRILIDGHETAHMPRTALRSQVGMVLPKSVLFEGTIMDNIRYGRLDATDDEVIAAAKATYVDRFVH

SEQ ID NO: 8973 - DNA, 300 bp, Homo sapiens
acgcgtccaggtcagcaggcccagcaaggaacctgagcaggccgcagggccgggacttccagccggccacggggacaccctgcatacggctggccttggtcctctccaccatgacaaggacgggacagcctgccttgggcagggctgctggctacatggggactgttgggcctgtgtgtgtatccgtgtggcccatgagcatgtcacccggcttccccagccctctagtcggcctggcctccgtcagagtccctacctcgccgtcaaaaggaccccaacccctccaccctaactcaattg

SEQ ID NO: 8974 - protein, 63 aa, Homo sapiens
MTRTGQPALGRAAGYMGTVGPVCVSVWPMSMSPGFPSPLVGLASVRVPTSPSKGPQPLHPNSI

SEQ ID NO: 8975 - DNA, 195 bp, Homo sapiens
ggcgccatgcgcaagatcaaggaggagggcgtgaccttcgcctcaccggtcgacggctccaaggtgttcatgggcccggaagagtcgatgcaggtgcagcgcgacctgggctccgacatcgtgatgatttttgacgagtgcacgccgtacccggcggatgaagacgtggcgcgcatttccatggagctgtcgctg

SEQ ID NO: 8976 - protein, 65 aa, Homo sapiens
GAMRKIKEEGVTFASPVDGSKVFMGPEESMQVQRDLGSDIVMIFDECTPYPADEDVARISMELSL

SEQ ID NO: 8977 - DNA, 198 bp, Homo sapiens
gaattcagagataatgcacctttaaaaaagttagattcccacacgcaatcaggtggtgaaagagctgtttctacagttctttacatgattgctttgcaagagtttacctctgcaccatttagagtggttgatgaaatcaatcaaggtatggactctagaaatgaaaggatcgttcataaagctatggtggagaacgcg

SEQ ID NO: 8978 - protein, 66 aa, Homo sapiens
EFRDNAPLKKLDSHTQSGGERAVSTVLYMIALQEFTSAPFRVVDEINQGMDSRNERIVHKAMVENA

SEQ ID NO: 8979 - DNA, 298 bp, Homo sapiens
acgcgtattggttttggttccactgcggtaatcactggcgatacctctcaagttgatttacctcgcggcaccgcgtctggtctaactcacgccatgcatgtattacgtggtgttaatggcattagtttgacacatttcacggctgctgatgtggttcgtcatcctctggtacaacgtatcgttgaggcttacgagcgcttcgatgtggaagaagaagttgagaaaaaagcacgtaccgaagctcgcttaaaagcgcaagcagaacaacaaggcaatcaagtataatggccaatctaga

SEQ ID NO: 8980 - protein, 94 aa, Homo sapiens
TRIGFGSTAVITGDTSQVDLPRGTASGLTHAMHVLRGVNGISLTHFTAADVVRHPLVQRIVEAYERFDVEEEVEKKARTEARLKAQAEQQGNQV

SEQ ID NO: 8981 - DNA, 425 bp, Homo sapiens
  misc_feature (424)..(424): Wherein n may be a, c, g or t
  misc_feature (425)..(425): Wherein n may be a, c, g or t
agatctgacatcatgaagtacaaaactttgctaagtgttacaatctccaaaacttttttctttccttctgaatttcttttttttctattgaccaaaatacaaacgaactcttattattattttttagaatcaatgccctttttcattatcttctataaggacagtcatccaatgctagtctctgaaatatttctcatctttagtgatatttctatatttccatcaccaccaccaccataaaatacctggttgtcttcactttaaactcaatttgctgttgtagtagtctaactgcccaaccttttttcccaaaatcattttaattattcctaaatactactctttagtccatggattctgtgatgcttaatttcatgtgtcaactttgctgggctatactgcccagttgtatgaacaaacactnn

SEQ ID NO: 8982 - protein, 75 aa, Homo sapiens
MKYKTLLSVTISKTFFFPSEFLFFLLTKIQTNSYYYFLESMPFFIIFYKDSHPMLVSEIFLIFSDISIFPSPPPP

SEQ ID NO: 8983 - DNA, 290 bp, Homo sapiens
caattgagcctcctgtattcccccttgggattcaaaacgggagctgctgctcatagccaccacgtgtgctggtgctggcagaatctggcaggaaggacacacggccaaagccttcctgtgagatggtgacaaaggagggggcccgccctggaggtggggagccctcaacatgcctctcaggaaggccccccagggtgtccaggagcagaggccaagaggcttcttttggagagaatacacccccaaaccagctctctctggagactcctccctgctgttagagcccacgt

SEQ ID NO: 8984 - protein, 57 aa, Homo sapiens [sequence omitted]

SEQ ID NO: 8985 - DNA, 351 bp, Homo sapiens
  misc_feature (1)..(1): Wherein n may be a, c, g or t
nacgcgtcaacaccaggctacggtgggtatgatcatgataagggctgggacccgcaggagagggcaagagttatataatagacgggtgtatgggtttaaggtatacatggtgatgagacaggtgattggataaggccagagggttgggcggggttctgcccctgctgaagcctggtggggcccaggtctgtgatctgggaccggaacaacacatctgctctgggcctgctggatgtggcgcaagccctggaacagaaccacagcctcaagtccatgccgctgccactgaatgacgtaacccaggctcatcgcagccggccagaactcacaactcgagcggtccatcagatc

SEQ ID NO: 8986 - protein, 61 aa, Homo sapiens
SLVGPRSVIWDRNNTSALGLLDVAQALEQNHSLKSMPLPLNDVTQAHRSRPELTTRAVHQI

SEQ ID NO: 8987 - DNA, 394 bp, Homo sapiens
  misc_feature (1)..(1): Wherein n may be a, c, g or t
  misc_feature (2)..(2): Wherein n may be a, c, g or t
nntagaaaaatagcagcaatcacacttctgggcatatatccaaaaataattgaaagaaggatctcaaagaatatttgcacactcatgttcattggagcattattcacaataggcaacatgcacaagcaaactaaatgtctattggcaggtgactgagtgtaagaaatcttgtcatatgcttcagcctgaatgaacctggaggacattccgttaagtgaaataagccagtcacaaaaagacaagtactgcctgatttctcttatatgaggtctctaaagtaatcaaactctagaaatagaaaatatattgccaggaactggtggtgggaggaaaaaaggggttgttcaatgagtatagagctgcgtttttcaagatagaaaagttttagagatct

SEQ ID NO: 8988 - protein, 51 aa, Homo sapiens
  misc_feature (1)..(1): Wherein Xaa may be any naturally occuring amino acid
XRKIAAITLLGIYPKIIERRISKNICTLMFIGALFTIGNMHKQTKCLLAGD

SEQ ID NO: 8989 - DNA, 397 bp, Homo sapiens
  misc_feature (1)..(1): Wherein n may be a, c, g or t
  misc_feature (2)..(2): Wherein n may be a, c, g or t
nnagatctttcctagctggctgaccggtgtcgcggcatcagtgtccgggcgatgcggctcttcgtgatcttcatgccgggcatcaccttgatcggcaacatcaccgtcggcctcatgctgctcaccggcggctacttcgccctgcgcagatgaacgacggtcggtgtcctgacgaccttcttgctgtacgctcgtcagttcttcgagctatacaccttccagtcggcatcctcgtccctgtacattccctcggggcgtttggtgcagcgggctttggggacgatccctgccgaccggaccgccgtcatcattgcccatcgtctgtcgacggtggagattgccgattgggtgctcgtgctggaacacagccagatccaggagaacggatccctggcca

SEQ ID NO: 8990 - protein, 81 aa, Homo sapiens
TTVGVLTTFLLYARQFFELYTFQSASSSLYIPSGRLVQRALGTIPADRTAVIIAHRLSTVEIADWVLVLEHSQIQENGSLA

SEQ ID NO: 8991 - DNA, 345 bp, Homo sapiens
cgcgtcgcggtcatcgtcaacgacatgagcgaggtcaacatcgacgcggcgctggtggcggcaggcggcgggctgtcgcgcaccgaggagaagctcgtcgagatgtcgaacggctgcatctgctgcacgctgcgcgacgacctgatgcaggaagtggcgagactggcgggcgaaggccgcttcgatgcgctggtcatcgagagcaccggcgtgtccgagccgatgccggtcgccgccacgttcgatttccgtgaccaggacggcgtctcgctcgccgacgtcgcgcggctggataccatggtcaccgtcgtcgacgccgcgtccttcctgcgcgactacggctcg

SEQ ID NO: 8992 - protein, 115 aa, Homo sapiens
RVAVIVNDMSEVNIDAALVAAGGGLSRTEEKLVEMSNGCICCTLRDDLMQEVARLAGEGRFDALVIESTGVSEPMPVAATFDFRDQDGVSLADVARLDTMVTVVDAASFLRDYGS

SEQ ID NO: 8993 - DNA, 289 bp, Homo sapiens
  misc_feature (46)..(46): Wherein n may be a, c, g or t
aagcttgctgaagcattggggtgcgctgttttccgggtcgcagacncgggcatggtcgacgagacgatcacagctgccaacacgatcaatgaccgcccggtcgtggtggaattcatcatccgcactgacgccatggtctggccgatggtggctttcggagccagtaatgatgaaatcacgatcgcccgagatatggctccggactggggtgacgttggagacgacgttgctcccggcgacgaggacagcaacgatgatgaggccgggaagatgagttgaccagacgcgt

SEQ ID NO: 8994 - protein, 92 aa, Homo sapiens
  misc_feature (16)..(16): Wherein Xaa may be any naturally occuring amino acid
KLAEALGCAVFRVADXGMVDETITAANTINDRPVVVEFIIRTDAMVWPMVAFGASNDEITIARDMAPDWGDVGDDVAPGDEDSNDDEAGKMS

SEQ ID NO: 8995 - DNA, 356 bp, Homo sapiens
  misc_feature (1)..(1): Wherein n may be a, c, g or t
ncgggccatggaagcgcaccgcgcctcgcggcagtgccacgctctccccaatccctcaaatgcatcggtcccgccgcggcgcagtgcgcccgagcggccagccgcgccgcatcggtctcgatgtgggtcgacgagtcgacgatgccacccagtggaccccgcgcgccacaggcgagtggcatggatgccccatggaacgcacgccggaacccgccgggccagtgccgccgtcttctgcctggcagcctgtgagataattagagacctaatgattagacctacggagacatagcgcggtttcgggatttacgtgccgtcgaacgctggaatcgcgcggagcccacatgagcacatga

SEQ ID NO: 8996 - protein, 94 aa, Homo sapiens
MEAHRASRQCHALPNPSNASVPPRRSAPERPAAPHRSRCGSTSRRCHPVDPARHRRVAWMPHGTHAGTRRASAAVFCLAACEIIRDLMIRPTET

SEQ ID NO: 8997 - DNA, 534 bp, Homo sapiens
gccggcactcaggaggtcttggaaatatgtgtcccgatggctcagcactttgcaatcaccatctcaggtgaccctgcagccactgtgaggtgggtgctggtcccacctccttcacaggtgccagctggcaggtggtggaggtttgaggcctgatcctccggacttctgtggtttaatcaaaggaggccacagctgctctgggccatggctcctccagagctcatcactgtgattattcattaaccccttagttatcagctaggacttcacagagattcccgggctgaaagtgaaagaaaggaggggacccaggaggacctggaggaggcgctgggtgctgtccagctgcctgggcctgagccgagagctgctgatctctggacatcttaagttccagggctccaaaggctgctttgtcctgcggacgcacggccatgggtgcactaggtgtttgatcattgacaatgtaaagttccttattctcggttttatcctctgtagaaatgaggataaaatacttggcttgtacaattg

SEQ ID NO: 8998 - protein, 66 aa, Homo sapiens
MIKHLVHPWPCVRRTKQPLEPWNLRCPEISSSRLRPRQLDSTQRLLQVLLGPLLSFTFSPGISVKS

SEQ ID NO: 8999 - DNA, 459 bp, Homo sapiens
  misc_feature (1)..(1): Wherein n may be a, c, g or t
ncaattgatatgatgcaagaatttagattaattatgaagagaattcataaagaaaataatgctcctattagaaaaccggaatttcaagcgatgctatttttatcttgtaaagaaaaaattacaatgcaggagctaggtgaagaactacatgtgacaaaacctcgagtcacagcacttgttggtgagttacttgaaaaagattttgttgttcaaagcatagatgaaaaagataaaagaaaaaaatatcttagtttatctgaaaaaggaatcgaatgcatagaattacatagaaaagcttatgaagagtggtttaagtctatatgggataaatttgatgctagagaaaaggaagcttttaatatattattaacaaaaacaaatctagtattaagagaagaaatacaagataaggaggaaaacaatgaaactaattaaatatttaaaaggttttttggtacc

SEQ ID NO: 9000 - protein, 144 aa, Homo sapiens
  misc_feature (1)..(1): Wherein Xaa may be any naturally occuring amino acid
XIDMMQEFRLIMKRIHKENNAPIRKPEFQAMLFLSCKEKITMQELGEELHVTKPRVTALVGELLEKDFVVQSIDEKDKRKKYLSLSEKGIECIELHRKAYEEWFKSIWDKFDAREKEAFNILLTKTNLVLREEIQDKEENNETN

SEQ ID NO: 9001 - DNA, 654 bp, Homo sapiens
gggggacatggtgaagatggcagctgacactggagggggcctgtgcgtcccaatgtgagtgatgctggaattccaaggggcttgaccactccaggccctgtgggttcaccaaggcatcagccaagctctcctctagctccagccccagtgctgggagaagctgctgaaatgagactctgaattgcccagaacagccgcaggagtagcaatggaaagaggagttcagatacatgtggggagcgaagcaaaggtctttgcaatcggccatgttttttaatgtttcatgaaaacaactgacttgggagctctggaaaagatctgacttcttgttccctcccacatgtttaggaaaaccaattttgcattaaaataagtatcagaaatggatcatagttatcttagtccctgcaggttgatagacaagatgccattgactgagtggcttataaacaataggaatttatcgcgtagtctggaggctgcgaagtccaaggtcaaggagtcagcaaacttggtgtctggtgagggctaactttcggattcatagagctctgttttctccctgtgtgctcacatggcagaaggggcaggcagctctccggggtccctcttataagggcactaatcccactcatgcaggctccaccctcatga

SEQ ID NO: 9002 - protein, 89 aa, Homo sapiens
MADCKDLCFAPHMYLNSSFHCYSCGCSGQFRVSFQQLLPALGLELEESLADALVNPQGLEWSSPLEFQHHSHWDAQAPSSVSCHLHHVP

SEQ ID NO: 9003 - DNA, 175 bp, Homo sapiens
  misc_feature (175)..(175): Wherein n may be a, c, g or t
acgcgtaggcgtcttcaggtttatcgccgttccactggaacagctgcaacgagcgaccatcgccatagacataacccaggctggtgctgagtttatcttgtggtacggatgccggaagttgcttgaaatcttcggcgaaggtggcgtactggccgcccatcaggtctttgtactn

SEQ ID NO: 9004 - protein, 53 aa, Homo sapiens
MGGQYATFAEDFKQLPASVPQDKLSTSLGYVYGDGRSLQLFQWNGDKPEDAYA

SEQ ID NO: 9005 - DNA, 313 bp, Homo sapiens
  misc_feature (313)..(313): Wherein n may be a, c, g or t
cgcgtgagcgtcgacaatgctccaggaaccggtgtgtatgaggccggggattctaccggtcgtggtttgcagggcatgcgtgagcgcgcccgtatccatggcggcaccgcgcgctggggcgactcgcagtattatgaaggcggtttcaacgtcacggtggagattccaacatgagcggccaaaggatgaacatggacacgacgcgccccaatcacggtcggggcttgccgacgatcagccggctgggtgcgcaccggttttgccatggtgctggattcgcaggacgacatcacggtggcctggcaagccgacn

SEQ ID NO: 9006 - protein, 57 aa, Homo sapiens
RVSVDNAPGTGVYEAGDSTGRGLQGMRERARIHGGTARWGDSQYYEGGFNVTVEIPT

SEQ ID NO: 9007 - DNA, 430 bp, Homo sapiens
  misc_feature (1)..(1): Wherein n may be a, c, g or t
naatgtatttttcactaatttcaaatgtccaattcaggttggtaagggagatgtgatcatgacagtgcctcaggagtccaggctccccttgatacatgcttccaggctccacttgatacatgcttccaaggttgccttgccaaaggtgaaagaaaacgtggcaaatcacattctgttctttaacttccactcacattttactggttacaaaaaggcacatggccatgcccgacattaagaattaaaggaaagggcaattcaatgattattttatgaagaatcatgactccctagtcccctgctgtcaaatatttattcttcccacatgaaaaaatacacctgtccctccattcagaagtaacccaatatccccatccagtctcagcatcaagatcaaaggacaggatctgcgctgatggggaaatcacct

SEQ ID NO: 9008 - protein, 59 aa, Homo sapiens
MTVPQESRLPLIHASRLHLIHASKVALPKVKENVANHILFFNFHSHFTGYKKAHGHARH

SEQ ID NO: 9009 - DNA, 298 bp, Homo sapiens
  misc_feature (1)..(1): Wherein n may be a, c, g or t
natagcgttctacgttggtccgcttgagccaactattatgattaccagacatcccgtgcaagaggtacaagactggaatgtctttacaatctggttcttccactcgattagcatcaggatagaggacattcactccccactccatatccaaaacttgtgagtaatactcgattttcattactgccataatttttcctctatttttctataagaaaaagccgaaattcgactttctctccgtttatttcatcgcttattttgcttccatgactactgggaaaatagctggacgacgctt

SEQ ID NO: 9010 - protein, 62 aa, Homo sapiens
MAVMKIEYYSQVLDMEWGVNVLYPDANRVEEPDCKDIPVLYLLHGMSGNHNSWLKRTNVERY

SEQ ID NO: 9011 - DNA, 266 bp, Homo sapiens
caattgggatcgagcacctgcgcggccttttcaacctgctgcacggactcgccacgctgcccaagatgccaggccagacgctgacgcgcgtacttcaccagatcaaggcgttgctcgccggccatggtccacagggcctggtcgtcgctgtcggaaagcggcccgtggagcgactccacgctaccgagccaacgctccttgccgcagcaggtggtccacaggtgatcggaccagaccgagtcccaggaaggcacatggacgccgtt

SEQ ID NO: 9012 - protein, 67 aa, Homo sapiens
MPGQTLTRVLHQIKALLAGHGPQGLVVAVGKRPVERLHATEPTLLAAAGGPQVIGPDRVPGRHMDAV

SEQ ID NO: 9013 - DNA, 192 bp, Homo sapiens
cccggggccgccccgcgcctcagtctccccggccatcatggacgtggaacgcccagcgcgcagcctcctgggctgccgcacggggggagagcgcatggctcccgccgcggcccgacagtcccctggacgcccacgacgcactctgagaaacagaggcttgggggcgcggccggtgggccgcgcacttgctcc

SEQ ID NO: 9014 - protein, 51 aa, Homo sapiens [sequence omitted]

SEQ ID NO: 9015 - DNA, 374 bp, Homo sapiens
  misc_feature (374)..(374): Wherein n may be a, c, g or t
tgatcatcctgataaaaagacccaaaaagaaacccaaataggcggcgaactggcgtcatagaagaggcgacgtaaaatcaagatacaaaacacaaaaggatcgcttgcgtgagaaaaacaaatcttgctcaatcccggtgcctcccaagcggcaccaaagcgtcagagtcgaatcatagagtgggagagcaatagtctttgggtatcaatatcaaacaattttaccagttcgcatacagaccctccgcgctcattcttagagctgatgcgctcccccactctggtaaaattgctggtcactatcatggacgtgagtcttggagacaggtctttgtgcttgaaaatcatgacaaaagaacagaaaagcaaacgcn

SEQ ID NO: 9016 - protein, 61 aa, Homo sapiens
MIFKHKDLSPRLTSMIVTSNFTRVGERISSKNERGGSVCELVKLFDIDTQRLLLSHSMIRL

SEQ ID NO: 9017 - DNA, 258 bp, Homo sapiens
aatcataagcgcgtgtacgggctttatcacctcagtggcttgggcgtaaaacgcagaagacgtcgtaaagggctggcaacagaacgtctgccgctgctccgtccggcggcgcccaatctgacctggtcgatggatttcgtcatggacgcattggccaccggtcgcaggatcaagtgccttacctgcgtagacgacttcacgaaggaatgcctgacggtcactgttgcctttgggatttcaggcgtgcaggtcacgcgt

SEQ ID NO: 9018 - protein, 86 aa, Homo sapiens
NHKRVYGLYHLSGLGVKRRRRRKGLATERLPLLRPAAPNLTWSMDFVMDALATGRRIKCLTCVDDFTKECLTVTVAFGISGVQVTR

SEQ ID NO: 9019 - DNA, 259 bp, Homo sapiens
ccatggacagatgattaagtggttccaatgggggaagcatgctgaaccctcaaatctgagaagagcagaatcctctgttctgcttagtggggataaagtgggttcaaattttcatgtgttggggtcagtatcaattttctgtggctgccttaacaaattatcacaaactggtagtttgaaaacagcagaaatttgttctcttggttctggagtctaaaagttcaaatcaaggggttggcagggctgcactctcatgaag

SEQ ID NO: 9020 - protein, 68 aa, Homo sapiens
MIKWFQWGKHAEPSNLRRAESSVLLSGDKVGSNFHVLGSVSIFCGCLNKLSQTGSLKTAEICSLGSGV

SEQ ID NO: 9021 - DNA, 150 bp, Homo sapiens
cgcgttgaacggcatggcgaaacggttgaaatccctctcgaacaggtggttgccggtgatgtggtcttcgtccggccgggggagaaaatcgcggtggatggcgaagttctggaaggcgcgtcttatgtcgatgaaagcatgatcaccggt

SEQ ID NO: 9022 - protein, 50 aa, Homo sapiens
RVERHGETVEIPLEQVVAGDVVFVRPGEKIAVDGEVLEGASYVDESMITG

SEQ ID NO: 9023 - DNA, 392 bp, Homo sapiens
aaatttgaatgtgaaaactattttgccgcagagacggcttcagtgcaataaactaataaatgccttcagatgcacagtaatctataacataacagatactcctcaacataggatggggttacatcccaataaggctatcgttagtggaaaagacccttagtcaaaatgcatttaatatgcccaaccaatgaaacatcatagcttagcctcacctaccttcagctcagaacactcacatcattgcacagttggcaaaatcatcggggctgggaaccgcagctccccctgcccagcttcgagggagttttgggatgcatgttgctaccccaggagagatcaaatctcaacattcgaacgatgatttcttctgaacgcatactgctttcacacac

SEQ ID NO: 9024 - protein, 57 aa, Homo sapiens
MKHHSLASPTFSSEHSHHCTVGKIIGAGNRSSPCPASREFWDACCYPRRDQISTFER

SEQ ID NO: 9025 - DNA, 250 bp, Homo sapiens
  misc_feature (250)..(250): Wherein n may be a, c, g or t
actagtacaggctagggtggggccagggaagaagagagctagaggagggacagaggaaaaggcaaaattcttctaactttatgaggttggctcttcccctgggttagatgctgttgaatttgttgcccatgggctcggatgggtagtggtttcaacatgcacctccaagcagcacccctaagcactggtgattcctggtgagatttgttcatgttttccgtattgtccccagctaacgtcaccatatgcn

SEQ ID NO: 9026 - protein, 68 aa, Homo sapiens
MVTLAGDNTENMNKSHQESPVLRGAAWRCMLKPLPIRAHGQQIQQHLTQGKSQPHKVRRILPFPLSLL

SEQ ID NO: 9027 - DNA, 279 bp, Homo sapiens
  misc_feature (277)..(277): Wherein n may be a, c, g or t
  misc_feature (278)..(278): Wherein n may be a, c, g or t
  misc_feature (279)..(279): Wherein n may be a, c, g or t
actagtgttgcctatggtgtatacatgtccatttctagtaaccccaggtatcagcttctggctggtgtgatcgagcagaggatgctggagccgttgctgcataaccagaagctactgctgagtgcaatgtgcttcatcgttcgtacgggcaacacattccttggccctttgctgtgggttgactatgccagatggataggcgtccagaagtctcacgaagaggcctaaagttctagcagcttgcctgcatgttccgctgtcactgcctcactagccnnn

SEQ ID NO: 9028 - protein, 75 aa, Homo sapiens
TSVAYGVYMSISSNPRYQLLAGVIEQRMLEPLLHNQKLLLSAMCFIVRTGNTFLGPLLWVDYARWIGVQKSHEEA

SEQ ID NO: 9029 - DNA, 209 bp, Homo sapiens
acgcgtgaagggcacactgtcattaaaaaggtgtcaataatctgtcactgatgagcaagaaaactcctttagatttcatggtgaggatgcacttggtcttaattcttatttatatgcctagtcctgcgtttgatttattttatgcttgcaccacctatttctctagcctccttgtgtgtccctgggctcttcaaaaggagaaggtcgtt

SEQ ID NO: 9030 - protein, 53 aa, Homo sapiens [sequence omitted]

SEQ ID NO: 9031 - DNA, 266 bp, Homo sapiens
  misc_feature (250)..(250): Wherein n may be a, c, g or t
tgatcataatttgttccatttgtagattccacttatggtaaatgtcatctggttcttttcggagcaaaggctgcctacattcctcttacattcagttctgtggtattttgtttccaacagaacaataaacaaaaacaaactgaatgtcacctgacaacaaaattcaacgcaactccaaggcaaagaaaagtagtttactttcagggtttttttagatttttttttcatgatttaaaagaggggacagagnttgattgaaattttat

SEQ ID NO: 9032 - protein, 74 aa, Homo sapiens [sequence omitted]

SEQ ID NO: 9033 - DNA, 350 bp, Homo sapiens
ttgatcaaatagtacaatggtcattattaaaaaatatggaacacatagaaggacataaagcagcaaaagatgtaaagcagcaagaaaaacaatttccaatggtttctgatctctttttaaaaatctgattccattggctaggcctatacttgctttaacactgtaaggcatacaatttggttttggaagcaggtaactcctgactatcccagcctcggaagaagttatgttgcatgcatgtttctgtgtagctgagtgaagagtgaaacgaggcacagaatacaaaggctgaatacacgtggaatcatagatgctgaaactagaatctttcagatcatctggtcaaattt

SEQ ID NO: 9034 - protein, 57 aa, Homo sapiens [sequence omitted]

SEQ ID NO: 9035 - DNA, 271 bp, Homo sapiens
  misc_feature (1)..(1): Wherein n may be a, c, g or t
nggacaggagtcgccgcgattccatctgtctgcaacgacggggagcttagggtcctggtggctttgggagtgagtggaggtgggctcaagggtgttgactgaggaggtgaagaaccgtgaaatggtgatagccgattatccatcaactggagactctttggcctttgtgcttttctggttgggctcatcaaatcgggttctggtgctttctctgcaatgacctgggacttgctcagaatccccattctttctcttaaacttgctggcgcgc

SEQ ID NO: 9036 - protein, 81 aa, Homo sapiens
MGILSKSQVIAEKAPEPDLMSPTRKAQRPKSLQLMDNRLSPFHGSSPPQSTPLSPPPLTPKATRTLSSPSLQTDGIAATPV

SEQ ID NO: 9037 - DNA, 477 bp, Homo sapiens
ccggatatggcagctcgacttcattcgaccagagttcttggaacatttggctatcatgcacctgagtatgcaatgactggacaacttagctctaagagtgacgtttacagttttggagttggtcttctggagctcctgactggaagaaagcctgtggatcttccattaccaagaggacagcaaagtcttgtgacatgggcaactccacggctttgtgaagataaagttaggcaatgcgttgattcaagacttggagtagaatatcctcctaaatccgttgcaaagtttgcagctgttgctgcactgtgtgtgcaatatgaagctgactttcgacccaacatgagcatcgtggtgaaggcgcttcagcccctgctgaatgcacgtgcatccaacaaccctggatgaatgaatgaatgactgccgttgcttttccctgacgagagtatctgaatcagacaatcatgtagcattgaattc

SEQ ID NO: 9038 - protein, 134 aa, Homo sapiens
PDMAARLHSTRVLGTFGYHAPEYAMTGQLSSKSDVYSFGVGLLELLTGRKPVDLPLPRGQQSLVTWATPRLCEDKVRQCVDSRLGVEYPPKSVAKFAAVAALCVQYEADFRPNMSIVVKALQPLLNARASNNPG

SEQ ID NO: 9039 - DNA, 272 bp, Homo sapiens
  misc_feature (46)..(46): Wherein n may be a, c, g or t
  misc_feature (47)..(47): Wherein n may be a, c, g or t
  misc_feature (112)..(112): Wherein n may be a, c, g or t
gactttcatagacatttctccaacaaagatatatggcctattgatnnatatgtgaaaaggtgctcaatattactaatcattaggaaaatgaaagtcaaaactacaatcaganaacacctcgcacctgtcaggatgaccattactaagaaaaaaaaaaaaaaaaccgggggcaggggcgggggggggccccgggccgggaaggggcgggggggggcaaatcggggaaaccagccaacggttttggcccttggttactactctttcccgagaag

SEQ ID NO: 9040 - protein, 90 aa, Homo sapiens
  misc_feature (16)..(16): Wherein Xaa may be any naturally occuring amino acid
  misc_feature (38)..(38): Wherein Xaa may be any naturally occuring amino acid
DFHRHFSNKDIWPIDXYVKRCSILLIIRKMKVKTTIRXHLAPVRMTITKKKKKKTGGRGGGGPRAGKGRGGANRGNQPTVLALGYYSFPR

SEQ ID NO: 9041 - DNA, 272 bp, Homo sapiens
gcttggaggggactgggctactacagcagggcgcgccgtctccatcagacagcccagattctgctcgcagcaccagacgagcctcgcaccctcggagagctactggctttaccaggactgggcccctacaccgcagccgccgtcgcctccatcgccttgggcctcccccacctggcgctcgacaccaacgctttgcgtgtgctcctgcgcctctatggctgggagacgcgagcggactcgatcgcggttcagaacgagctgagacgacgcgt

SEQ ID NO: 9042 - protein, 90 aa, Homo sapiens
AWRGLGYYSRARRLHQTAQILLAAPDEPRTLGELLALPGLGPYTAAAVASIALGLPHLALDTNALRVLLRLYGWETRADSIAVQNELRRR

SEQ ID NO: 9043 - DNA, 336 bp, Homo sapiens
cgcgtggccatcgcccgcgcgctgtgccagcaggccgaggtgattctcgccgacgaacccatcgcctcgctcgatccggagtcggcacgcaaggtgatggagattctcgccgacatcaaccgccgcgatggcaagacggtggtggtgaccctgcatcaggtcgattacgcggtgcgctattgccagcgcgccgtggcgctcaagggcgggcgaattcatttcgacggacccaccgaaagcttcaatcccgattttctcaacgatctctacgggggggatctcgatatcagcctgctgctgccggaagggcagcgcccacggggctgtagagcgtcc

SEQ ID NO: 9044 - protein, 112 aa, Homo sapiens
RVAIARALCQQAEVILADEPIASLDPESARKVMEILADINRRDGKTVVVTLHQVDYAVRYCQRAVALKGGRIHFDGPTESFNPDFLNDLYGGDLDISLLLPEGQRPRGCRAS

SEQ ID NO: 9045 - DNA, 492 bp, Homo sapiens
acgcgtgaagggttagagataacatacatgaaacgaccacaagctccccaagggcaaaggtttctgacattccggttctctgccattttccctgtgcccagaagagcacttggtccatagtatgtgctcaatgaatgtaaatgggataaaaaacacggaacgaacactctgccaacgatgctgctgttcctttgtcatcactgcttctgtttaggctgtagctgacttatctaaggccatacagctgctcaatgcatagcccgcagtccaagatggctctgctcgtcctaacctcgtgctgttccctgcacacagggaactgtttgaatgagctcgtctctgggaaatgagaagacgccccaggcagctccaggctaggatgatgagactcttaactctgctcccacctcagcaactaatggagggggcgagggatgtgggagctttcaggggaggtggctcttgtgtgggatttaggttccatgtgggccc

SEQ ID NO: 9046 - protein, 61 aa, Homo sapiens [sequence omitted]

SEQ ID NO: 9047 - DNA, 261 bp, Homo sapiens
tggggcatatgaccttggaccgtctgcacgtagccatggaactcgacgcccgcgctgagccgttgagcagggcgctgggcaagcgcatcccagcgagccaggcgatgctggtggagagcccggacagtcaacatgaaggccgtgagtggacgctggtgcgcaaggatggcagccagctgacggtcaacatgttgccgaccgtgctcttggatgaccatggcctgtgggtcgggcacctggcgatttatctggatgtcaccg

SEQ ID NO: 9048 - protein, 84 aa, Homo sapiens
MTLDRLHVAMELDARAEPLSRALGKRIPASQAMLVESPDSQHEGREWTLVRKDGSQLTVNMLPTVLLDDHGLWVGHLAIYLDVT

SEQ ID NO: 9049 - DNA, 380 bp, Homo sapiens
  misc_feature (205)..(205): Wherein n may be a, c, g or t
  misc_feature (211)..(211): Wherein n may be a, c, g or t
  misc_feature (247)..(247): Wherein n may be a, c, g or t
  misc_feature (295)..(295): Wherein n may be a, c, g or t
caattgtcagtatttcctgtacgatgcctggccaagttaattttctacaggttagtggccgccatgcgtgtaaaagcatccaacagcaaagcaaagccagctcccgccgttgaaaccagcgaatcgatcaacagccagatcgctgcgttcctcaagtccgggggggaaaatccagcaaattgccaagggcgtgagcggccagacnttcggnccgtccaagcagatcatcctgggcaagaagtaatantcttacccgcgcactgcatcttgtcccctagcgtcttgcctttcaggngctatgactatagtttcacccccctccccacacctcatacgcagctatcgacgacggggctcacgtctggattcgcggtatcctg

SEQ ID NO: 9050 - protein, 105 aa, Homo sapiens
  misc_feature (48)..(48): Wherein Xaa may be any naturally occuring amino acid
  misc_feature (50)..(50): Wherein Xaa may be any naturally occuring amino acid
  misc_feature (62)..(62): Wherein Xaa may be any naturally occuring amino acid
  misc_feature (78)..(78): Wherein Xaa may be any naturally occuring amino acid
MRVKASNSKAKPAPAVETSESINSQIAAFLKSGGENPANCQGRERPDXRXVQADHPGQEVIXLPAHCILSPSVLPFRXYDYSFTPLPTPHTQLSTTGLTSGFAVS

SEQ ID NO: 9051 - DNA, 447 bp, Homo sapiens
  misc_feature (1)..(1): Wherein n may be a, c, g or t
  misc_feature (2)..(2): Wherein n may be a, c, g or t
nnacgcgttagagaaaatacaacaagatttttttttcgtgtcaccaatggcatgaaagcttcgagaataactttgaaggaaatttcacttaatgggaaaaataaaaatgtacccttatcgagattacttttttaccctcagttcaattaaaattcattcatgaaccaagtaaaagttcctctaattacgaacgagcaaacaaattagtattgtgtgggagacgggatgaaattatttaacaaggaagaagcgagcctcgagactctgttaaaacgattactcgttgtctgtgagtcccatagcaggtaccatggttcgagcttggacccaatggttaaagttggtcatgaaatgagaaaaattagcggttacttgagatgcattttgagaaagcatgctgcaaatcatgatggcatgtctctaacacaatccatagtgaattttcgg

SEQ ID NO: 9052 - protein, 74 aa, Homo sapiens
MKLFNKEEASLETLLKRLLVVCESHSRYHGSSLDPMVKVGHEMRKISGYLRCILRKHAANHDGMSLTQSIVNFR

SEQ ID NO: 9053 - DNA, 186 bp, Homo sapiens
atccccgaggacctgcacaaccaagctttccttgatcgctactgcgtcggtttcgatgacaaacatctacccgaaggaacatcagccggttcgtcttaccgggcctatctggaggggaagggacccgaccataccatcaagaacgcgcagtgggcctcccacatcaccggagatccggcacagcgg

SEQ ID NO: 9054 - protein, 62 aa, Homo sapiens
IPEDLHNQAFLDRYCVGFDDKHLPEGTSAGSSYRAYLEGKGPDHTIKNAQWASHITGDPAQR

SEQ ID NO: 9055 - DNA, 324 bp, Homo sapiens
  misc_feature (1)..(1): Wherein n may be a, c, g or t
nacgcgttacgacctttgacagtggttgttaactgtggtaatggtagtgctgcgccaacgattgatttgcttgagcagcgtctacaagctgccaacgcgcctattaattttatcaaaatcaatcatgcgcctgacggcagttttcccaatggtattcccaaccccatgattattgccaaccgtaaagtgacggcagacacgctgttggcagagaaagcggacttagcgattgcgtttgatggcgattttgaccgctgttttttctttgatgaaaacgcccgatttttggagggcacttatgtagtgggggtgcttgccaaagct

SEQ ID NO: 9056 - protein, 108 aa, Homo sapiens
  misc_feature (1)..(1): Wherein Xaa may be any naturally occuring amino acid
XALRPLTVVVNCGNGSAAPTIDLLEQRLQAANAPINFIKINHAPDGSFPNGIPNPMIIANRKVTADTLLAEKADLAIAFDGDFDRCFFFDENARFLEGTYVVGVLAKA

SEQ ID NO: 9057 - DNA, 336 bp, Homo sapiens
  misc_feature (1)..(1): Wherein n may be a, c, g or t
naagcttataacgacgctttctctctctctttctcttttctcagccctacaggtttatttattcttcagtagaaccaattggtcccgtcgttcctctgtgccgcgcctgagtagtcgacgccgctagacatgttgaaaccaggaccgaacctgaactccggcgcgctggcggcgatgtcgcccatctcgctcacgaatggcgtgtcgtcgcggatgaagaactgctgctgctgctgcactggcgcctggtgttgctgctgctgctgctgctcatgctgttgacgtcgtcgaaggctccgttgccctgtacgaagaaaccctcgtccatctggatcc

SEQ ID NO: 9058 - protein, 50 aa, Homo sapiens
MLKPGPNLNSGALAAMSPISLTNGVSSRMKNCCCCCTGAWCCCCCCCSCC

SEQ ID NO: 9059 - DNA, 318 bp, Homo sapiens
gggcccctgaagagagtaacagcccctgaactccccaggactttaagatttacacacatcttagcagaggcccaggtggtggtccccggtgtgatttcccacaagatttctggcaggccaggtatgatggcatttatattaacaatagtatctggcttctctccttcccccatgtctggggctttctaaggaaaaggttgctttggtaacaataaaataagggccttaagggttttatccgggaatctcctgttatcattgcttaataaagggttaaagaaaaggaacccccaacccaggttaagggttagttcccta

SEQ ID NO: 9060 - protein, 57 aa, Homo sapiens [sequence omitted]

SEQ ID NO: 9061 - DNA, 297 bp, Homo sapiens
gtgcacccgatcagcggtgagcgggcgctgcagctggggcatttcgtcaaacgcatcaagggctattcgctggccgattcgcagcacttgttcgcggtgctgcaagggcatgtcacgcgccttgagaacaccgtgcgctggcgctgggaggcgggcgatgtggctatctgggataaccgtgcgacacagcactacgcggtggatgattatgggacccagccacgtatcgtgcgccgggtaacgctggccggtgaagtgccggtgggcgtggatggccaactgagccgtactacgcgt

SEQ ID NO: 9062 - protein, 99 aa, Homo sapiens
VHPISGERALQLGHFVKRIKGYSLADSQHLFAVLQGHVTRLENTVRWRWEAGDVAIWDNRATQHYAVDDYGTQPRIVRRVTLAGEVPVGVDGQLSRTTR

SEQ ID NO: 9063 - DNA, 453 bp, Homo sapiens
gaattcaagcctatagcttgtcacgtatctgttggctcacctggctggtgtagggcagcagccaagcccacagcaatgtcagctgcattgctccttccctcagtttttctggctccaggaccaggtgtgcacttacctctaacaaatcatcagcttttgctgcataacatccccatcattgaggctggagacttggggacagtgagagaacaatgtgggttccagtccaccctcaccctcatgggttccaactggccctttttctcccacttgacatctatcttccctttctgctgtgcaaactgtagactgctgctgcagcatcaggacagaaacagtatcctaaagtacactgtttaactagcacccacaggtgcatataatcaatatctatatccacatcattatagctatatctataatctatagtaccttctaatgggtctgcttctc

SEQ ID NO: 9064 - protein, 94 aa, Homo sapiens
MSAALLLPSVFLAPGPGVHLPLTNHQLLLHNIPIIEAGDLGTVREQCGFQSTLTLMGSNWPFFSHLTSIFPFCCANCRLLLQHQDRNSILKYTV

SEQ ID NO: 9065 - DNA, 447 bp, Homo sapiens
cagggcgttgcgctcggtcgcgtgctgccgatggtcatgctcggaggcttaaccgccatcattatctccggctgcctgaaccagcttggtaaacgctatccgcatctgaccggcgaaggccaactgatgccaaaccgtgctaatgctgataccacggcttcccaaccggcgttctccggtaaagcggacgtgaccaccattgcctccggcgcgttgctggccgtgctgctttacatggtgggtaggttggttcacaagttgattggcctgcctgctccggttggcatgttgtttgtggcggtgctggtcaaactgtgcaacggcgcttctccccgcctgctcgaaggctcgcaggtggtttacaaattcttccagacctccgtcacctatccgattctgttcgccgttggcgtggcgattacgccgtggcaggaactggtcaacgcg

SEQ ID NO: 9066 - protein, 149 aa, Homo sapiens
QGVALGRVLPMVMLGGLTAIIISGCLNQLGKRYPHLTGEGQLMPNRANADTTASQPAFSGKADVTTIASGALLAVLLYMVGRLVHKLIGLPAPVGMLFVAVLVKLCNGASPRLLEGSQVVYKFFQTSVTYPILFAVGVAITPWQELVNA

SEQ ID NO: 9067 - DNA, 428 bp, Homo sapiens
gaattcgccaaacggcaaaggacccttgcattgcctgaaaggaaagattcgcttttctgtttgttgccacttttcttacatagtctgggccgggagcagcttatttcttccgcggatgatcctggatttccttgcgcgggctcagccatggggagccttacctagtcccgtaaagggaaaaagctaacctcattcgcctcacagggtgaaagcgtgaacaaaaaaaaaagaaaagcttaatgattaaaatttacagtaatcatatatttgtatttacgtattaaactatatataaatagatatgtaggccgaaaaagtaaagtctgggtgaggcctagtccaatctttcttactactgtccagtttctatcgtagcagttaattatacatagaactgtgtaaattcaacgcattaattttttcttttc

SEQ ID NO: 9068 - protein, 54 aa, Homo sapiens
EFAKRQRTLALPERKDSLFCLLPLFLHSLGREQLISSADDPGFPCAGSAMGSLT
